(19) United States
(12) Patent Application Publication
(10) Pub. No.: US 2013/0157887 A1
(43) Pub. Date: Jun. 20, 2013

(54) DISCRETE STATES FOR USE AS BIOMARKERS

(71) Applicants: Manfred Beleut, Winterthur (CH); Peter Schraml, Basel (CH); Holger Moch, Urdorf (CH); Michael Baudis, Zurich (CH); Philip Zimmermann, Grenchen (CH); Wilhelm Gruissem, Forch (CH); Karsten Henco, Dusseldorf (DE)

(72) Inventors: Manfred Beleut, Winterthur (CH); Peter Schraml, Basel (CH); Holger Moch, Urdorf (CH); Michael Baudis, Zurich (CH); Philip Zimmermann, Grenchen (CH); Wilhelm Gruissem, Forch (CH); Karsten Henco, Dusseldorf (DE)

(21) Appl. No.: 13/697,419

(22) PCT Filed: May 12, 2011
(86) PCT No.: PCT/EP2011/057691

§ 371 Date: Mar. 11, 2013

Related U.S. Application Data
(60) Provisional application No. 61/334,318, filed on May 13, 2010.

(30) Foreign Application Priority Data
May 13, 2010 (EP) 10162783.4

(51) Int. Cl. C12Q 1/68

(52) U.S. Cl. CPC C12Q 1/6837; C12Q 1/68
USPC 506/9; 435/6.1

(57) ABSTRACT

The present invention describes the use of discrete states and signatures for classifying samples.

### BACKGROUND OF THE INVENTION

### Field of the Invention

[0001] Before the advent of molecular biology and medicine, diseases have largely been classified on the basis of their phenotypic characteristics. This, of course, means that a disease can only be diagnosed when phenotypic characteristics become apparent which may occur at a rather late stage of disease development. Further, it is nowadays understood that similar phenotypes may result from different molecular mechanisms. A strictly phenotype-based therapy may therefore be useless if the therapeutic approach taken does not address the right underlying mechanism.

[0002] As an example, breast cancer may develop by different molecular mechanisms which lead to the same appearance in terms of tumor formation. One such mechanism will involve up-regulation of Her2 while others will not. Therapy with the antibody Herceptin® which addresses overexpression of Her2 will therefore only help patients which are afflicted correspondingly. If one does not understand at least to some degree the molecular mechanisms underlying a disease, a chosen therapy may not prove effective.

[0003] Molecular biology and medicine therefore aim at deciphering the molecular basis of disease development. A better understanding of the molecular basis of a disease will help detecting imminent or ongoing disease development early on and will allow medical practitioners adjusting their therapy early on or developing alternative treatment approaches. For example, if one knows that Herceptin® will be effective only in a specific group of patients, one can pre-select these patients and treat them accordingly. Further, if one realizes that different diseases result at least to some degree from the same mechanism, one can consider a drug, which has originally been developed for one disease only also for treatment of the other diseases. This, of course, requires that molecular markers, which are frequently designated as biomarkers, are at hand being characteristic for the disease in question and relating to relevant mechanisms, relevant clinical endpoints and relevant criteria to select proper treatment. Such markers may be found on the DNA, the RNA or the protein level.

[0004] In the case of monogenetic diseases, using molecular markers as a diagnostic tool is relatively straightforward as one can use the aberration on the DNA level to predict whether the disease will develop with a certain probability or not. For example, tri-nucleotide expansions on the DNA level may be used to predict whether an individual will develop Huntington Chorea. Similarly, mutations in the Survival of Motor Neurons gene can be used to predict whether an individual will develop Spinal Muscular Atrophy.

[0005] Since the beginning of molecular understanding of tumor diseases there is a desire to define molecular markers associated with tumorigenesis, malignancy, progression, metastasis formation, responsiveness to treatment, survival times and other functional properties important for clinicians and for the development of efficient therapies. A number of useful markers were identified, first of all pathological markers for the inspection of samples such as derived from tissue sections (large sections, fine needle biopsies), body fluids, smears (blood, feces, sputum, urine) or hair samples. A number of markers got identified such as markers of inflammation or ongoing apoptosis, markers of metabolic properties or molecular markers derived from mechanistic understanding of tumor induction, induced by deregulated balances between oncogenes such as Ras, Myc, CDKs and tumor suppressor genes such as p16, p27 or p53 (see e.g. Hanahan & Weinberg in “The Hallmarks of Cancer” (2000).

[0006] Specific understanding of tumor development mechanisms such as uncontrolled cellular growth, senescence and apoptosis evasion, such as extravasation, invasion, and evasion of immune responses have further accentuated the tumor suppressor gene hypothesis.

[0007] However, the vast majority of diseases such as hyper-proliferative disease including cancers does not result from mono-genetic causes but are due to aberrant complex molecular interactions.

[0008] Cancer, for example, is considered as a prime example for multi-factorial diseases which arise from subtle to severe deregulation of complex molecular networks. In most cases, these diseases do not develop from a single gene mutation but rather result from the accumulation from mutations in various genes. Each single mutation may not be sufficient in itself to start disease development. Rather, accumulation of mutations over time seems to increasingly deregulate the complex molecular signaling networks within cells. In these cases, disease development has therefore usually been considered to be a gradual continuous process which cannot be characterized by key events. As a consequence thereof, it is commonly assumed that such diseases cannot be diagnosed or classified by a single biomarker but by a group of markers which ideally would reflect in a simplified manner the complex molecular mechanisms underlying the disease.

[0009] Despite the large amount of molecular information available from many human cancers, current cancer research mainly still focuses on single, frequently altered chromosomal loci ideally harboring tumor type-specific biomarker candidates with drug target potential such as enhanced angiogenesis lead to the understanding of tumor promoting roles of the Her-receptor family and its ligands and related mutants. Some of those attempts indeed led to certain useful markers for the selection of tumor therapies (Herceptin® treatment for patients of amplified Her-2 receptors).

[0010] All these results mainly resulted from a maximum of expert knowledge. The general and common assumption is that tumors must be different from normal tissues due to above mentioned target expression. The majority of studies, often linked to pathologic parameters (such as tumor subtypes, grade or staging), therefore address their focus on the investigation of single targets. Even though their role in certain pathways and their binding partners may become evident in appropriate cell lines or mouse models their specific role as part of an entire network remains unclear.

[0011] The human genome project together with all its spin-off projects such as analysis of individual genome varieties between individuals or just individual cells affected by a disease, analyses of respective transcriptomes, proteomes etc. were assumed to directly provide a large variety of useful biomarkers. Interestingly, most of these approaches have tried again to link the phenotypic differences observed for disease with distinct molecular pathways.

[0012] There are e.g. a number of types and subtypes of diseases, obviously associated with some clearly differentiable markers on the level of e.g. organs such as lung cancer or prostate cancer or e.g. cell types. The common concept for identifying biomarkers is to link such phenotypes to distinct combinations of biomarkers which then allow diagnosing the specific subtype of disease, which displays the respective phenotype. Such approaches, for example, try identifying distinct proteome expression patterns for small cell lung cancer tissues or non-small lung cancer tissues of afflicted patients vs. healthy individuals and to then use such expression patterns to diagnose patients in the future. Interestingly, these approaches frequently do not look at linking clinically relevant parameters such as survival time with markers.

[0013] However, the wealth and complexity of data have hindered clear cut identification of such patterns to some extent.

[0014] There is thus a continuing need for tools allowing classification of diseases on the molecular level and provision of biomarkers which can be used for e.g. diagnostic purposes.

### SUMMARY OF THE INVENTION

[0015] It is one objective of the present invention to provide new types of markers, which are suitable and specific for classifying diseases, preferably with clear correlation to clinically or pharmacologically relevant endpoints.

[0016] It is also an objective of the present invention to provide methods for detecting markers which are suitable and effective for classifying diseases, preferably with clear correlation to clinically or pharmacologically relevant endpoints.

[0017] These and other objectives as they will become apparent from the ensuing description are attained by the subject matter of the independent claims. The dependent claims relate to some of the preferred embodiments of the invention.

[0018] The present invention provides a strategic and direct approach to global and functional biomarkers of clinical relevance for essentially all kinds of tumors and potentially non-tumor diseases, too. With the present finding of tumors being associated with discrete stable or meta-stable states, one is now able to define methods allowing the skilled person to not only identify and prove the existence of such discrete states for any kind of tumor but to assign such states with descriptors and signatures associated with such states. In addition, the technology allows to identify a minimum of those descriptors which unequivocally identify and discriminate each such discrete state from alternative states in a given tumor cell sample.

[0019] The understanding of such states also allows identifying those descriptors with a large dynamic range for quantitative measurement and ease of experimental access.

[0020] The invention is thus based on the surprising finding that diseases can be characterized by discrete states, which reflect the underlying molecular mechanisms. Interestingly, these discrete states are distinct from one another so that disease development does not seem to be characterized by a continuous process. Rather, a discrete state seems to be maintained until a certain threshold level is reached when a switch to another discrete state occurs. Further, it seems that the discrete states can be linked to clinically and pharmacologically important parameters. However, they do not necessarily seem to coincide with standard histological classification schemes.

[0021] Each discrete state can be described by way of different signatures. A signature is a pattern reflecting the qualitative and/or quantitative appearance of at least one descriptor. Preferably, a signature is a pattern reflecting the qualitative and/or quantitative appearance of multiple descriptors. Descriptors may in principle be any testable molecule, function, size, form or other parameter that can be linked to a cell. Descriptors may thus be e.g. genes or gene-associated molecules such as proteins and RNAs. The expression pattern of such molecules may define a signature.

[0022] These findings of the invention can be used for various diagnostic, prognostic and therapeutic purposes. They may also be used for research and development on and of new treatments for diseases such as hyper-proliferative diseases.

[0023] In one aspect, the invention thus relates to at least one discrete disease-specific state for use as a diagnostic and/or prognostic marker in classifying samples from patients, which are suspected of being afflicted by a disease such as a hyper-proliferative disease. The invention further relates to at least one discrete disease-specific state for use as a diagnostic and/or prognostic marker in classifying cell lines of a disease such as a hyper-proliferative disease. The invention also relates to at least one discrete disease-specific state for use as a target for development, identification and/or screening of pharmaceutically active compounds.

[0024] As discrete disease specific states may be determined by signatures, the invention in one embodiment relates to at least one signature for use as a diagnostic and/or prognostic marker in classifying samples from patients which are suspected to be afflicted by a disease such as a hyper-proliferative disease. The invention also relates to at least one signature for use as a diagnostic and/or prognostic marker in classifying cell lines of a disease such as a hyper-proliferative disease. The invention further relates to at least one signature for use as a read out of a target for development, identification and/or screening of pharmaceutically active compounds.

[0025] In some embodiments, the invention relates to methods of diagnosing a disease such as a hyper-proliferative disease by making use of signatures and discrete disease-specific states.

[0026] The invention also relates to methods of determining the responsiveness of a test population suffering from a disease such as a hyper-proliferative disease towards a pharmaceutically active agent by making use of signatures and discrete disease-specific states.

[0027] Further, the invention relates to methods of predicting the responsiveness of patients suffering from a disease such as a hyper-proliferative disease in clinical trials towards a pharmaceutically active agent by making use of signatures and discrete disease-specific states.

[0028] The invention also relates to methods of determining the effects of a potential pharmaceutically active compound by making use of signatures and discrete disease-specific states.

[0029] Aside from the specific uses of discrete disease specific states and signatures, the invention also relates to methods for identifying signatures and discrete disease specific states in samples which may be derived from patients or which may e.g. be cell lines.

[0030] All of these embodiments of the invention can be used in the context of diseases including hyper-proliferative diseases such as cancer and preferably in the context of renal cell carcinoma.

### DESCRIPTION OF THE FIGURES

[0031] FIG. 1 A) Regional genomic CNAs in RCC shown as percentage of analyzed cases. Imbalance frequencies are shown as percentages on −50 to 50 scale for chromosomes 1 to 22 (every second chromosome is indicated for orientation). Upper panel: depiction of the overall CNAs in the 45 study cases, genomic gains are depicted above the zero line, genomic losses are depicted below the zero line. Lower Panel: published chromosomal and array CGH RCC data accessible through the Progenetix database (472 cases). CNVs were not filtered from the study case data besides application of a 100 kb size limit. Genomic gains are depicted above the zero line, genomic losses are depicted below the zero line. B) The PANTHER classification output matches 557 genes previously identified by SNP to 76 superior biological processes. The 4 dominating “networks” are numbered. The Y-axis indicates the number of genes found for a network on a scale of 0 to 38. Note: To increase matching efficacy, the initial 769-gene list was simultaneously run against “Pubmed” and “Celera” databank. Therefore, divergent output numbers are shown in this bar chart (ex. Genes/Total genes).

[0032] FIG. 2 Hierarchical clustering of HG-U133A microarray probe sets representing genes from the Angiogenesis (A), Inflammation (B), Integrin (C), and Wnt (D) “pathways” as annotated by PANTHER, across a set of 147 microarrays from our RCC experiment. Blue: relative increase-, white: -decrease in gene expression. For each “pathway”, up to four probe set clusters (boxes) were selected, which were strongly representative for the overall partitioning of the RCC samples. The clusters were identified by the SAM software. Each row designates the genes analyzed for each pathway. Each line represents the samples analyzed. The densograms next to the lines and above the rows indicate the grouping of the samples and genes.

[0033] FIG. 3 Identification of RCC groups A, B, C and cell lines. Two-way hierarchical clustering of Affymetrix expression microarray data of 147 RCC samples against 92 genes assembled from clustering the most significant biological processes. Blue: relative increase-, white: -decrease in gene expression. The clusters were identified by the SAM software. Each row designates the genes analyzed. Each line represents the samples analyzed. The densograms next to the lines and above the rows indicate the grouping of the samples and genes.

[0034] FIG. 4 Heatmaps of RCC group- and different cancer type-specific signatures. Yellow or red (absolute values) indicate relative increase-, blue or green (ratios of tumors vs. normal tissues) relative decrease in gene expression. The areas in which overexpression is observed are indicated by arrows. A) Gene expression of the about 50 best classifiers of tumor type B against A and C across a subset of types A, B and C tumors (left picture). Comparative meta-analysis of these genes in GENEVESTIGATOR revealed multiple other tumor types with identical expression signatures (right picture). Rows indicate the samples, lines indicate the genes. The first 34 lines (top to bottom, left and right picture) correspond to the genes in the order of table 1. The last 16 lines (top to bottom, left and right picture) correspond to the genes in the order of table 2. The first 16 rows (left to right, left picture) correspond to samples of which 7 were papillary RCCs and 9 were clear cell RCC. All of them are of state B. The next 24 rows (left to right, left picture) correspond to samples of which 7 were papillary RCCs and 17 were clear cell RCC. All of them were either state A or C. The next 20 rows (left to right, right picture) correspond to samples of which 4 were kidney cancers and RCCs, 3 were breast cancers, 1 was multiple myeloma, 1 was adnexal serous carcinoma, 4 were anaplastic large cell lymphoma, 1 was oral squamous cell carcinoma, 1 was gastric cancer, 1 was colorectal adenoma, 4 were angioimmunoblastic T-cell lymphoma. These were either state A or C. The next 8 rows (left to right, right picture) correspond to samples of which 1 was a gastric tumor, 6 were an ovarian tumor and 1 was an aldosterone-producing adenoma. All of them were state B. In the left picture, the upper left part and lower right part indicate overexpression. The lower left part and upper right part indicate reduced expression. The dashed line indicates the left, right, upper and lower parts. In the right picture, the upper left part and lower right part indicate reduced expression. The lower left part and upper right part indicate overexpression. The dashed line indicates the left, right, upper and lower parts. B) Gene expression of the 24 best classifiers of tumor type A against C across a subset of types A and C tumors (left picture), and correlated other tumors (right picture) as identified in GENEVESTIGATOR. All signatures are cancer-specific and not detectable in corresponding “normal” tissues. Rows indicate the sample, lines indicate the genes. The first 5 lines (top to bottom, left and right picture) correspond to the genes in the order of table 3. The first two lines represent different isoforms of the same gene (RARRES 1). The last 19 lines (top to bottom, left and right picture) correspond to the genes in the order of table 4. The first 9 rows (left to right, left picture) correspond to samples all of which were clear cell RCCs. All these are state A. The next 15 rows (left to right, left picture) correspond to samples of which 7 were papillary RCCs and 8 were clear cell RCC. These are state C. The next 4 rows (left to right, right picture) correspond to samples of which 2 were kidney cancers and 2 were thyroid cancers. These are state A. The next 12 rows (left to right, right picture) correspond to samples, of which 2 were cervical squamous cell carcinoma, 1 was adenocarcinoma, 1 was adnexal serous carcinoma, 3 were bladder cancers and 5 were breast cancers. These are state C. In the left picture, the upper left part and lower right part indicate reduced expression. The lower left part and upper right part indicate overexpression. The dashed line indicates the left, right, upper and lower parts. In the right picture, the upper left part and lower right part indicate reduced expression. The lower left part and upper right part indicate overexpression. The dashed line indicates the left, right, upper and lower parts. C) Hierarchical clustering of 40 RCC samples across all probe sets of the HG-U133A array, identifying the 3 groups which are indicated by arrows as state A, B or C (left). Hierarchical clustering of the 40 (colour coded) RCC samples based on expression signal values from 662 probe sets representing a subset of the 769 genes identified from the SNP array analysis, unravelling the 3 RCC groups (right). The densogram reflects the relationship between the 40 RCC samples. D) Kaplan-Meier analysis of tumour-specific survival in 176 RCC patients; grouped in A (high MVD, DEK and MSH positive), B (MSH6 negative) and C (low MVD, DEK and MSH positive) (log rank test: p<0.0001). The y-axis indicates the percentage of survivors in 0% to 100% scale. The x-axis indicates the average survival time on a 0 to 100 month scale.

[0035] FIG. 5 RCC test-TMA with antibody staining combinations of the markers CD34, DEK and MSH6 used to define group A, B and C. Magnified images illustrate specific staining of endothelial micro vessels (CD34) and nuclei of tumor cells (DEK and MSH6).

[0036] FIG. 6 Shows the analysis of RCC testing with different antibodies.

[0037] FIG. 7 An evolutionary driven molecular classification model for renal cell cancer.

### DETAILED DESCRIPTION OF THE INVENTION

[0038] The present invention as illustratively described in the following may suitably be practiced in the absence of any element or elements, limitation or limitations, not specifically disclosed herein.

[0039] The present invention will be described with respect to particular embodiments and with reference to certain figures but the invention is not limited thereto but only by the claims. Terms as set forth hereinafter are generally to be understood in their common sense unless indicated otherwise.

[0040] Where the term “comprising” is used in the present description and claims, it does not exclude other elements. For the purposes of the present invention, the term “consisting of is considered to be a preferred embodiment of the term “comprising of”. If hereinafter a group is defined to comprise at least a certain number of embodiments, this is also to be understood to disclose a group, which preferably consists only of these embodiments.

[0041] Where an indefinite or definite article is used when referring to a singular noun, e.g. “a”, “an” or “the”, this includes a plural of that noun unless something else is specifically stated.

[0042] In the context of the present invention the terms “about” or “approximately” denote an interval of accuracy that the person skilled in the art will understand to still ensure the technical effect of the feature in question. The term typically indicates deviation from the indicated numerical value of ±10%, and preferably of ±5%.

[0043] As mentioned above, previous attempts in finding diagnostic tools for disease characterization have assumed that disease development is a continuous process and have tried to link different primarily histological phenotypes of e.g. cancers such as lung cancer with specific expression patterns assuming that the different detectable phenotypes reflect continuous and progressive disease development.

[0044] The present invention is instead based on the finding that it seems that diseases such as hyper-proliferative diseases can comprehensively be described by a limited set of discrete disease-specific states which do not necessarily correlate with established histological characterization of different subtypes of such a hyper-proliferative disease but which can be linked to clinically relevant parameters such as survival time. Without wanting to be bound to a specific scientific theory or expert knowledge, it is hypothesized that a disease is characterized by switching to discrete disease-specific states. This suggests that de-regulation of regulatory networks within a cell can occur to a certain a threshold level without the overall discrete state being affected. However, once the threshold level has been exceeded cells seem to switch to another specific discrete state. These states can therefore be considered as stable or meta-stable in that they may allow for a certain degree of variation before they may switch. We understand a discrete state to reflect the flow and extent of interactions between and within different regulatory networks. As cells seem to switch to different discrete states, such a switch seems to indicate a major re-arrangement of the flow and extent of interactions between and within different regulatory networks, which may lead to a changed aggressiveness of a disease and which may also help explaining why different discrete states can be linked to e.g. different average survival times.

[0045] Interestingly, there are discrete states that can be found in different types of hyper-proliferative diseases such as renal cell carcinoma or ovarian cancer, which may indicate that at least some forms of these diseases involve comparable molecular mechanisms. Further, there may be discrete states that can be found only within a specific hyper-proliferative disease.

[0046] The extent and flow of interactions between and within such different regulatory networks may be detectable by e.g. the expression level of e.g. proteins within such regulatory networks. The molecular entities, which are looked at can be designated as descriptors. The pattern, which is detected for a set of descriptors, can be considered as a signature. In the aforementioned example, the signature will be the expression pattern of proteins, which function as the descriptors. Of course, one may chose different types of descriptors and different types of signatures. One may thus look at expression levels of genes on the RNA level. One may look at the regulation of miRNAs and one may even look at the qualitative distribution of descriptors such as the cellular localization of certain factors or the shape of a cell. One may use a given set of descriptors of the same type of molecules (e.g. mRNAs) to define signatures with the different signatures reflecting e.g. different expression patterns or one may use a given set of descriptors which are a group of different molecules (such as mRNAs, proteins and miRNAs). It is thus important to note that according to the invention's logic a discrete state can be correlated to different signatures. As single signature will, however, define one discrete state only.

[0047] It follows from the invention as laid out hereinafter that the same discrete state can be characterized through different signatures.

[0048] As illustrated hereinafter for renal cell carcinoma (RCC), such discrete disease-specific states can be linked to medically important parameters such as average survival times. Interestingly, however, the discrete disease-specific states do not necessarily correlate with common histological classification schemes meaning that e.g. papillary RCCs of different patients may be characterized by different discrete molecular states and that the patients may thus have different survival expectations even though their cancers have been classified as comparable by histological standards. Moreover, it has been found that some of the discrete molecular states found for RCC can also be detected in other cancer types suggesting that different cancers, which are usually considered being unrelated in fact result at least to some extent from the same molecular interactions that define a discrete state.

[0049] Thus, a novel interpretation of carcinogenesis is suggested, which aims at a molecular de novo classification of tumors. This de novo classification lead to the identification of discrete disease specific states and signatures. The signatures were initially dissected in renal cell carcinoma (RCC) as a model, unbiased from current clinico-pathological (i.e. tumor stage, subtype, differentiation grade, tumor-specific survival), genetic (i.e. allelic gain/increased “oncogene” expression, allelic loss/decreased “tumor suppressor gene” expression) and biological (i.e. von Hippel-Lindau protein regulated pathways) valuations.

[0050] The finding that diseases such as hyper-proliferative disease can be characterized by different discrete disease-specific states, which may be present in different types of diseases, has important implications.

[0051] The discrete disease-specific state(s) may be used to classify patients and samples thereof as falling within distinct groups. As the discrete disease-specific state can moreover be linked to clinically important parameters such as survival time or responsiveness to distinct drugs, this will help selecting therapeutic regimens. The discrete molecular state(s) may thus be used as diagnostic and/or markers providing a new way of classifying tumors into clinically relevant subgroups e.g. subgroups of RCC, ovarian cancer, breast cancer etc.

[0052] A lot of projects for the development of novel pharmaceuticals suffer from insufficient differentiation from existing therapies, non-conclusive statistical data or a need for enormously high numbers of patients in Phase II or Phase III demanding for multimillion dollar investments and extensive time periods. If, however, a drug can be shown to act preferentially only in a selected group of patients which suffer from e.g. a subtype of lung cancer and which are characterized by the same discrete disease-specific state of interacting molecular networks, then this drug may be tested in other patients which suffer from a different disease, but are characterized by the same discrete molecular state. It can be expected that such clinical trials will give statistically reliable results for much smaller patient groups. In fact, one may be able to show that treatment is effective where large scale clinical trial could not give such results because the large number of non-responders will avoid any statistically meaningful interpretation of the results.

[0053] The discrete states thus provide a stratifying tool for the testing of pharmacological treatments as it allows grouping of patients for clinical trials. Assuming a drug candidate is identified which is expected or hoped to positively influence the critical parameter of survival time substantially, this needs to be proven by clinical trials in order to receive FDA approval. Future drugs will likely focus on mechanistic intervention. If the mechanistically active drug is successful for the clinical end point parameter “survival time”, it probably interacts selectively with mechanisms linked to the parameter “survival time”. These mechanistic subgroups are exactly those defined by e.g. the discrete molecular states enabled by this invention. It is thus fair to believe, that most probably one subgroup of patients reacts positively to a different degree than another subgroup does. Knowledge of this patient cohort-specific imbalance is of utmost importance for the industry seeking approval for a drug, important to know for the physician to choose the optimum regimen and for the payors to spend money most efficiently on patients with promise of therapeutic success. Any definition of a subgroup reacting with maximum relative effect in terms of prolonged life expectancy improves the chance for FDA registration.

[0054] The knowledge about discrete disease-specific states may also allow using these states as targets during development of pharmaceutical products. For example, different discrete specific disease states may be linked to clinically relevant parameters such as survival time or response rate to a certain drug. If an agent is shown to switch the discrete disease-specific state in a sample or in a cell line from a state, which is linked to short survival time, into a state with long survival time, such a switch may be used as an indication that the agent may be therapeutically effective in treating the disease in question. Thus, assays can be designed which make use of the correlation between a discrete disease-specific state and e.g. the associated clinical parameter.

[0055] Further, knowing that discrete disease-specific states exist as such enables one now to identify new discrete disease-specific states. For example, the present invention shows that RCCs can be roughly characterized by three different discrete disease-specific states. Some of these discrete disease-specific states are shown to be present in cancers different from RCC such as e.g. ovarian cancer in addition. However, not all ovarian cancers can be linked to the discrete states, which were found for RCCs meaning that different discrete disease-specific states should be identifiable for ovarian cancer. In this context the invention also provides methods for identifying discrete molecular states or statistically excluding novel discrete disease specific states of a substantial subset of patients. For example, the invention shows that all cases of RCC can be attributed to three distinct discrete disease specific states.

[0056] The logic of these methods can also be used to define discrete substates within discrete states and further discrete substates within discrete substates which for ease of nomenclature may be designated as discrete level. This discrete substates and discrete level may allow describing a disease at an even finer level.

[0057] The specific discrete disease-specific states as identified herein can thus be used to not only characterize RCCs, but also to characterize other cancers or diseases in general. Further, they can provide guidance whether other discrete disease-specific states will exist in these other diseases.

[0058] The invention further provides methods for identifying such discrete disease-specific states as such as well as methods for identifying signatures of descriptors, which can be used to detect a discrete disease-specific state. For RCC, the invention in fact provides a list of gene descriptors, the expression pattern of which (i.e. the signature) allows classifying RCCs according to the average survival time.

[0059] The fact that one now knows that discrete disease-specific states exist and drive disease development in all its aspects allows one to identify signatures of descriptors, which can then be used in a diagnostic test to classify diseases such as different types of hyper-proliferative diseases. These signatures of descriptors thus serve as a read-out for the classification of a disease or its subtype.

[0060] The invention and its embodiments will now be described in greater detail. For a better understanding of the following definitions, a rough outline of the findings in the context of RCCs is given. The data, which led to the identification of discrete disease specific states, will then be discussed in further detail later on.

[0061] It was found that the overall majority of RCCs irrespective of their histological characterizations as papillary, chromophobe and clear cell RCC can be classified into three discrete disease-specific states which are indicative of a long, intermediate and short survival time. The discrete disease-specific states are thus likely reflecting the aggressiveness of the tumor. The read-out for these three discrete molecular states which are designated hereinafter as A, B and C are the expression patterns, i.e. the signatures of a limited set of descriptors, i.e. genes. The same signatures, i.e. expression patterns of the same genes were then detected at least to some extent in other cancer types such as lymphoma, myeloma, breast cancer, colorectal cancer or ovarian cancer. This suggests that developing different hyper-proliferative diseases involves to at least some extent the same molecular mechanisms. Further, this finding suggests that different hyper-proliferative disease can be classified to some extent into the same discrete disease-specific stages. These states in turn allow a prognosis of the survival times of these different hyper-proliferative diseases. In order to identify the signatures and thus the discrete disease-specific states of RCCs an approach of hierarchical clustering of expression data was used which can be applied to identify further discrete disease-specific states in these different cancers or other diseases. It is key feature of this approach that it looks at descriptors from at least two different regulatory networks.

[0062] We will now provide definitions useful to understand the present invention and will then discuss the invention in more detail.

[0063] “State” means a stable or meta-stable constellation of a cell and/or cell population which is identified in at least two biological samples from at least two patients and which can be described by means of a single descriptor or multiple descriptors on the cellular or molecular level referenced against a standard state. As explained hereinafter, such state can be identified through analyzing descriptors from at least two regulatory networks. As explained hereinafter, such state can be characterized by at least one or various signatures or surrogate signatures.

[0064] “Substate” means a stable or meta-stable constellation of a cell within a state which is identified in at least two biological samples from at least two patients and which can be described by means of at least two descriptors on the cellular or molecular level referenced against a standard state. As explained hereinafter, such substate can be identified through analyzing descriptors from at least two regulatory networks. As explained hereinafter, such substate can be characterized by at least one or various signatures or surrogate signatures.

[0065] “Level” means a stable or meta-stable constellation of a cell within a substate which is identified in at least two biological samples from at least two patients and which can be described by a at least three descriptors on the cellular or molecular level referenced against a standard state. As explained hereinafter, such level can be identified by analyzing descriptors from at least two regulatory networks. As explained hereinafter, such level can be characterized by at least one or various signatures or surrogate signatures.

[0066] By definition, different states, substates and levels refer to different stabile and metastabile constellations of a cell meaning that these constellations are distinct from each other in terms of the kind and extent of molecules of at least two regulatory networks interacting within a cell. Different states, substates and levels can be characterized by a limited set of descriptors giving rise to different signatures. They may therefore also be designated a “discrete molecular state, substate or level”.

[0067] If a state, substate or level is indicative of a disease, it may be designated as “disease specific molecular state, substate, or level”. In certain instances, a disease specific state, substate, or level may be linkable to clinically relevant parameters such as survival rate, therapy responsiveness, and the like.

[0068] A state, substate or level, which can be found in healthy human or animal subjects may be designated as “healthy state, substate, or level”.

[0069] The term discrete disease specific state, substate or level preferably allows distinguishing different subtypes of a disease according to a new classification scheme which links the subtype being characterized by a discrete disease specific state, substate or level to clinically or pharmacologically important parameters.

[0070] The terms “clinical or pharmacological relevant parameter” preferably relate to efficacy-related parameters as they will be typically analyzed in clinical trials. They thus do not necessarily relate to a change in the histological appearance of a disease, but rather to important clinical end points such as average survival time, progression-free survival times, responsiveness to a certain drug, subjective patient- or physician-rated improvements making use established scale systems, tolerability, adverse events. The terms also include responsiveness towards treatment.

[0071] “Descriptor” means a measurable parameter on the molecular or cellular level which can be detected in terms of, but not limited to existence, constitution, quantity, localization, co-localization, chemical derivative or other physical property. A descriptor thus reports at least one qualitative and/or quantitative measuring parameter of, but not limited to existence, kinetic variation, clustering, cellular localization or co-localization of at least one specific mRNA, processing or maturation derivatives of at least one specific mRNA, specific DNA-motifs, variants or chemical derivatives of such motifs, such as but not limited to methylation pattern, miRNA motifs, variants or chemical derivatives of such miRNA motifs, proteins or peptides, processing variants or chemical derivatives of such proteins or peptides or any combination of the foregoing.

[0072] By way of example, a descriptor may be a protein the over- or underexpression of which can be used to describe a discrete disease-specific state, substate or level vs. a different discrete disease-specific state, substate or level or vs. the discrete healthy state, substate or level. If different proteins, i.e. different descriptors are analyzed for their expression behavior, the observed pattern of over- and/or underexpression for this set of descriptors gives a rise to a pattern, which may be designated as signature (see below). It is to be understood that different types of descriptors may be used to describe the same discrete state, substate and level. For example, a set of descriptors may comprise expression data for a first set of proteins, data on post-translational modifications of a second set of proteins and data for a group of miRNAs.

[0073] Preferred descriptors include genes and gene-related molecules such as mRNAs or proteins.

[0074] The “qualitative” detection of a descriptor refers preferably to e.g. determining the localization of a descriptor such as a protein, an mRNA or miRNA within e.g. a cell. It may also refer to the size and/or the shape of cell.

[0075] The “quantitative” detection of a descriptor refers preferably to e.g. determining the presence and preferably the amount of a descriptor within a given sample.

[0076] In a preferred embodiment the quantitative measurement of a descriptor relates to detecting the amount of genes and gene-related molecules such as mRNAs or proteins.

[0077] The pattern resulting from the analysis of this combined set of descriptors will then be considered to be a signature.

[0078] “Signature” means a pattern of a set of at least two experimentally detectable and/or quantifiable descriptors with the pattern being a characteristic description for a discrete state, substate and/or level.

[0079] “Surrogate signature” shall mean any kind of potential alternative signature suitable for characterizing the same discrete state, substate or level.

[0080] Signal transduction refers to the communication between molecules interacting outside, on and/or inside in order to provide a chemical or physical output signal in response to a chemical or physical input signal. It is thus used as common in the art.

[0081] The term “signal transduction chain” as it is commonly used in the arte refers to the full or complete series of molecules, which linearly interact with each other to convert a set of specific chemical or physical input signals into a set of specific or chemical output signals. Thus, linear signal transduction pathways have been defined to describe e.g. the step wise signaling from specific receptors such as integrins into the cell's nucleus. It is understood that different linear signal transduction chains can cross-communicate with each other or comprise regulatory mechanisms such as feed-back loops.

[0082] “Regulatory network” describes the multidimensional nature and kybernetics of linearly simplified signal transduction chains and their interactions. They thus define the set of molecules which may belong to different signal transduction pathways but which may contribute to biological processes such as inflammation, angiogenesis etc. the impairment of which may contribute to a disease in all its aspects.

[0083] Regulatory networks may preferably those, which are provided by the PANTHER software (Protein Analysis Through Evolutionary Relationships, see e.g. http://www.pantherdb.org, Thomas et al., Genome Res., 13: 2129-2141 (2003), (20, 21)). The PANTHER software when used at its standard parameters comprises 165 regulatory networks, which may also be designated as pathways.

[0084] The term “diseases” relate to all types of diseases including hyper-proliferative diseases. The term reflects the all stages of a disease, e.g. the formation of a disease including initial stages, the development of a disease including the spreading of a disease, the stages of manifestation, the maintenance of a disease, the surveillance of a disease etc.

[0085] The term “hyper-proliferative” diseases relates to all diseases associated with the abnormal growth or multiplication of cells. A hyper-proliferative disease may be a disease that manifests as lesions in a subject. Hyper-proliferative diseases include benign and malignant tumors of all types, but also diseases such as hyperkeratosis and psoriasis.

[0086] Tumor diseases include cancers such as such as lung cancer (including non small cell lung cancer), kidney cancer, bowel cancer, head and neck cancer, colo(rectal) cancer, glioblastom, breast cancer, prostate cancer, skin cancer, melanoma, non Hodgkin lymphoma and the like.

[0087] In particular, cancers considered are as defined according to the International Classification of Diseases in the field of oncology (see http://en.wikipedia.org/wiki/carcinoma). Such cancers include epithelial carcinomas such as epithelial neoplasms; squamous cell neoplasms including squamous cell carcinoma; basal cell neoplasms including basal cell carcinoma; transitional cell papillomas and carcinomas; adenomas and adenocarcinomas (glands) including adenoma, adenocarcinoma, linitis plastic, insulinoma, glucagonoma, gastrinoma, vipoma, cholangiocarcinoma, hepatocellular carcinoma, adenoid cystic carcinoma, carcinoid tumor, prolactinoma, oncocytoma, hurthle cell adenoma, renal cell carcinoma, grawitz tumor, multiple endocrine adenomas, endometrioid adenoma; adnexal and skin appendage neoplasms; mucoepidermoid neoplasms; cystic, mucinous and serous neoplasms including cystadenoma, pseudomyxoma peritonei; ductal, lobular and medullary neoplasms; acinar cell neoplasms; complex epithelial neoplasms including Warthin's tumor, thymoma; specialized gonadal neoplasms including sex cord-stromal tumor, thecoma, granulosa cell tumor, arrhenoblastoma, Sertoli-Leydig cell tumor; paragangliomas and glomus tumors including paraganglioma, pheochromocytoma, glomus tumor; nevi and melanomas including melanocytic nevus, malignant melanoma, melanoma, nodular melanoma, dysplastic nevus, lentigo maligna melanoma, sarcoma and mesenchymal derived cancers, superficial spreading melanoma and acral lentiginous malignant melanoma.

[0088] The term “sample” typically refers to a human or individual that is suspected to suffer from e.g. a hyper-proliferative disease. Such individuals may be designated as patients. Samples may thus be tissue, cells, saliva, blood, serum, etc.

[0089] The term “cell lines” will designate cell lines which are either primary cell lines which were developed from patients' samples or which are typically be considered to be representative for a certain type of hyper-proliferative diseases.

[0090] It is to be understood that all methods and uses described herein in one embodiment may be performed with at least one step and preferably all steps outside the human or animal body. If it is therefore e.g. mentioned that “a sample is obtained” this means that the sample is preferably provided in a form outside the human or animal body.

[0091] It will be first described how signatures can be identified in accordance with the invention. It is to be understood that a signature will be indicative of a discrete disease-specific state.

[0092] In principle, signatures and discrete disease-specific states can be identified by analyzing for the quality and/or quantity of descriptors from at least two different regulatory networks for a multitude of samples from either patients of a hyper-proliferative diseases or cell lines of a hyper-proliferative disease. This data is then analyzed for certain patterns by (i) grouping the data for the quality and/or quantity across descriptors and (ii) grouping samples or cell lines in a second step for similarities of the quality and/or quantity of descriptor across all potential descriptors.

[0093] The present invention in one embodiment thus relates to a method of identifying a signature and optionally at least one discrete disease-specific state being implicated in a disease, optionally in a hyper-proliferative disease comprising at least the steps of:

[0094] a. Testing for quality and/or quantity of descriptors of genes or gene associated molecules in disease-specific samples derived from human or animal individuals which are suspected of suffering from said disease or in cell lines of said disease;

[0095] b. Clustering the results obtained in step a.) comprising at least the steps of:
[0096] i. Sorting the results for each descriptor by its quality and/or quantity,
[0097] ii. Sorting the disease-specific samples or cell lines for comparable quality and/or quantity of descriptors across all descriptors;
[0098] iii. Identifying different patterns for common sets of descriptors;
[0099] iv. Allocating to each pattern identified in step a.)iii.) a signature;
[0100] v. Optionally allocating to each signature identified in step b.),iv.) a discrete disease-specific state.

[0101] For such methods, it can be preferred to detect the quantity such as the expression of descriptors such as mRNAs or proteins. However, one may also look at other properties of other descriptors such as localization and processing of miRNAs or post-translational modification of proteins. One may thus look e.g. at the localization, the processing, the modification, the kinetics, the expression etc. of descriptors. For the sake of clarity, the following embodiments will be discussed with respect to expression patterns of descriptors such as mRNAs or proteins as these descriptors shall allow for straightforward identification of signatures and their implementation for e.g. diagnostic and/or prognostic purposes. It is however to be understood that this focus on expression data serves an explanatory purpose and shall not be construed as limiting the invention to expression data.

[0102] The clustering step b.) may be e.g. a hierarchical clustering process as it is implemented in various software programs. A suitable software may be e.g. the TIGR MeV software (23) using Euclidian distance and average linkage. The software is used with its default parameters.

[0103] The clustering step may preferably be a “two way hierarchical” clustering approach wherein e.g. first genes, i.e. descriptors are sorted by their expression intensity and wherein then samples are sorted for a comparable expression across all genes, i.e. all descriptors. In more detail, a two way clustering may be performed by the software according to gene expression intensities and tumor similarities. As a result, those tumors with an overall similar gene expression profile reside adjacent to each other. The software is used with its default parameters with Pearson Correlation as distance measure and optimal Leaf Ordering.

[0104] If this approach is undertaken for e.g. all human genes across a sufficient number of samples, in principle signatures, i.e. patterns of e.g. expression data should appear for a given set of descriptors. The identification of such signatures can be performed using SAM (12). The software is used with its default parameters. If a pattern for a set of descriptors has been identified, one can cross-check the accuracy by using alternative software such GENEVESTIGATOR (10, 11). It is to be understood that for a set of given descriptors, the appearance of different signatures is tantamount to the presence of discrete disease-specific states at this level of resolution. In more detail, a two way clustering may be performed by the software according to gene expression intensities and tumor similarities. As a result, those tumors with an overall similar gene expression profile reside adjacent to each other. The software is used with its default parameters with Pearson Correlation as distance measure and optimal Leaf Ordering.

[0105] This general approach may be limited in practical terms by e.g. the number of samples available or the necessary computing power.

[0106] There are, however, means to overcome these limitations and to allow identification of signatures with higher accuracy and speed.

[0107] In a preferred embodiment, the invention therefore relates to a method of identifying a signature and optionally at least one discrete disease-specific state being implicated in a disease, optionally a hyper-proliferative disease comprising at least the steps of:

[0108] a. Testing for quality and/or quantity of descriptors of genes or gene associated molecules in disease-specific samples derived from human or animal individuals suffering from said disease or in cell lines of said diseases;

[0109] b. Clustering the results obtained in step a.) comprising at least the steps of:
[0110] i. Sorting the results for each descriptor by its quality and/or quantity,
[0111] ii. Sorting the disease-specific samples or cell lines for comparable quality and/or quantity of descriptors across all descriptors;
[0112] iii. Identifying different groups of descriptors which are differentially regulated across said disease-specific samples or cell lines;

[0113] c. Combining the descriptors which are identified in step b.)iii.) wherein the quality and/or quantity of said descriptors disease-specific samples or cell lines are already known from step a.);

[0114] d. Clustering the results obtained in step c.) comprising at least the steps of:
[0115] i. Sorting the results for each descriptor of step c.) by its quality and/or quantity,
[0116] ii. Sorting the disease-specific samples or cell lines for comparable quality and/or quantity of descriptors across all descriptors;
[0117] iii. Identifying different patterns for the set of descriptors obtained in step c.);
[0118] iv. Allocating to each pattern identified in step d.)iii.) a signature;
[0119] v. Optionally allocating to each signature identified in step d.),iv.) a discrete disease-specific state.

[0120] This approach differs from the above embodiment in that the obtained data is clustered twice according to the same sorting principle. Thus in the first round of clustering, roughly defined groups of genes can be characterized which are differentially regulated across different samples such as different tumor samples or cell lines. This repeated clustering may allow reducing the amount of data and thus improving the signal-to-noise ratio.

[0121] It is the attempt of all clustering processes described hereinafter such as the two-way clustering to bring tumors with descriptor profiles such as the same expression profiles in proximity. The resulting dendrogram tells one the conditions which are concentrated into one “pattern”.

[0122] The clustering in both steps may be performed by the TIGR MeV software (23) using Euclidian distance and average linkage. The software is used with its default parameters. The identification of groups after the first clustering step and then of signatures after the second clustering step can be performed using SAM (12). The software is used with its default parameters. If a pattern for a set of descriptors has been identified, one can cross-check the accuracy by using alternative software such GENEVESTIGATOR (10, 11).

[0123] In this first round, the selection may be rather rough allowing inclusion of groups which are not clearly defined by e.g. visual inspection as the second round of clustering will then sharpen the analysis.

[0124] In principle, the accuracy of the analysis will benefit if as many genes and as many samples are analyzed. If, however, e.g. computing power is a limitation, expression may be analyzed of about 100 to about 2000 genes, such as about 200 to about 1000 genes, about 200 to about 800 genes, about 200 to about 600 genes or preferably about 200 to about 400 genes in about 50 to about 400 samples, in about 75 to about 300 samples, in about 100 to about 200 samples and preferably in about 100 samples.

[0125] This data is then subjected to a first round of e.g. hierarchical two-way clustering yielding groups of differential regulated genes. These groups of genes are then combined and submitted to a second round of hierarchical two-way clustering. The expression data, which was initially obtained before the first round of clustering, can, of course, be used for the second round of clustering.

[0126] This approach allows for more straightforward identification of signatures and thus of discrete disease-specific states. As an example, one may obtain expression data for about 200 to about 400 genes in about 100 RCC samples, which will evenly represent all types of RCCs such as papillary, clear cell and chromophobe RCCs. In the first round of clustering, one may identify 20 groups with overall 100 genes. Group 1 may comprise 10 genes, Group 2 may comprise 20 genes, Group 3 may comprise 6 genes etc.

[0127] These 100 genes are then submitted to a second round of hierarchical two-way clustering. The software will then yield three distinguishable patterns, i.e. three signatures for the set of 400 descriptors. As there will be only three signatures for all types of RCCs one knows, that there are three discrete disease-specific states on this level of resolution. In a further step, one can then identify the set of genes for which the expression data most reliably distinguish between the three different states. One can then also analyze how these signatures correlate with e.g. survival rates.

[0128] There are further approaches that make identification of groups with differentially regulated genes and thus the identification of signatures and discrete disease-specific states more quickly and which ultimately can help reducing the size of set of descriptors.

[0129] This approach looks for analysis of quality and/or quantity of descriptors in known regulatory networks. The identification of groups of e.g. differentially expressed genes within single networks may be more straightforward as some networks may contribute stronger to e.g. tumor development than others. This may allow sorting out of certain networks, reducing the amount of data and thus improving the signal-to-noise ratio.

[0130] The invention in a particularly preferred embodiment thus relates to a method of identifying a signature and optionally at least one discrete disease-specific state being implicated in a disease, optionally in a hyper-proliferative disease comprising at least the steps of:

[0131] a. Testing for quality and/or quantity of descriptors of genes or gene associated molecules which are associated with at least two regulatory networks in hyper-proliferative disease-specific samples derived from human or animal individuals suffering from said disease or in cell lines of hyper-proliferative diseases;

[0132] b. Clustering the results obtained in step a.) comprising at least the steps of:
[0133] i. Sorting the results for each descriptor within at least one regulatory network by its quality and/or quantity,
[0134] ii. Sorting the disease-specific samples or cell lines for comparable quality and/or quantity of descriptors across all descriptors within one regulatory network;
[0135] iii. Identifying different groups of descriptors which are differentially regulated across said disease-specific samples or cell lines within each regulatory network;

[0136] c. Combining the descriptors which are identified in step b.)iii.) wherein the quality and/or quantity of said descriptors disease-specific samples or cell lines are already known from step a.);

[0137] d. Clustering the results obtained in step c.) comprising at least the steps of:
[0138] i. Sorting the results for each descriptor of step c.) by its quality and/or quantity,
[0139] ii. Sorting the disease-specific samples or cell lines for comparable quality and/or quantity of descriptors across all descriptors;
[0140] iii. Identifying different patterns for the set of descriptors obtained in step c.);
[0141] iv. Allocating to each pattern identified in step d.)iii.) a signature;
[0142] v. Optionally allocating to each signature identified in step d.),iv.) a discrete disease-specific state.

[0143] Again, clustering may be a hierarchical two-way clustering as described above. The clustering in both steps may be performed by the TIGR MeV software (23) using Euclidian distance and average linkage. The software is used with its default parameters. The identification of groups after the first clustering step and then of signatures after the second clustering step can be performed using SAM (12). The software is used with its default parameters. If a pattern for a set of descriptors has been identified, one can cross-check the accuracy by using alternative software such GENEVESTIGATOR (10, 11).

[0144] In this embodiment, one will thus run a first clustering round for all genes which are allocated by e.g. a software (see below) to a specific regulatory network (steps a to b)iii.)). This clustering round will be run for different regulatory networks. As a limited set of genes is thus clustered for each network, specific patterns may emerge (see FIG. 2). The descriptors, e.g. the genes of these patterns of all analyzed networks are then combined (step c) and the combined set is subjected to a second clustering (steps d)i. to v.).

[0145] One may further streamline this method of identifying signatures and states.

[0146] As mentioned, focusing on regulatory networks in a first round of clustering (step b) may be the most reliable way of identifying signatures as a lot of networks will not result in identifiable groups in step b.)iii.). The number of descriptors such as genes which will be combined for the second clustering step will thus be even more reduced.

[0147] However, as for the afore-described embodiment with two clustering rounds, a set of descriptors will be obtained which is the combined list of all descriptor groups which were identified in the regulatory network analysis. In the second round of clustering, this set of descriptors will then give rise to patterns, i.e. signatures which allow grouping sample into distinct discrete disease-specific states. In the case of RCC, this approach was taken (see FIGS. 2, 3 and 4) and three states A, B, C were identified.

[0148] The networks, which are used in the first clustering round, may be those as they are described in the PANTHER software. In principle, one may use all 165 regulatory networks of the PANTHER software. However, one may incorporate an initial selection step and determine for a given set of samples those regulatory networks which are most affected in the samples. To this end, one may analyze, which networks comprise most frequent descriptors. One may then select the most e.g. 2, 3, 4, 5, 6, 7, 8, 9 or 10 most affected regulatory networks and perform the initial clustering step for these networks only. The example for RCC shows that the general results, i.e. the number of discrete disease-specific states will not differ depending on whether one analyzes the 4 most affected pathways or all 76 affected pathways. Of course, looking at a reduced number of pathways may reduce the number of descriptors, i.e. the set of descriptors, which is used for the second clustering round and may thus improve the signal-to-noise ratio and simplify signature identification.

[0149] The analysis may further be simplified by initially identifying descriptors such as genes which are likely affected in a disease. This may be done by e.g. identifying single nucleotide polymorphisms (SNPs) which may be indicative of disease samples. For example and as described in the experimental section, one may analyze samples from disease affected tissue of one individual, where histological analysis confirms that the tissue is affected by the disease, and samples from the same tissue of the same individual, where histological analysis confirms that the tissue is not affected by the disease, for differences in SNPs. These candidate genes can then e.g. be allocated to regulatory networks by e.g. using the PANTHER software. One then identifies the 1, 2, 3, 4, 5 or more regulatory networks which seem most frequently affected because e.g. they comprise the majority of genes for which SNPs were identified. In a subsequent analysis, disease samples are then analyzed for the expression of all genes belonging to these most frequently affected networks even not all of these genes were identified in the SNP analysis. One then uses this expression data in the above described methods.

[0150] One may use any initial selection method that yield such candidate descriptors such as methods identifying methylation, phosphorylation etc.

[0151] In principle, it could be sufficient to use the above approaches with just e.g. two regulatory networks and analyze just two samples. The reliability and resolution of the analysis will usually be increased if one considers more regulatory networks and tests more samples. Good results may be obtainable by testing e.g. at least about 50 such as about 75, 100, 150 or 200 samples. In terms of regulatory networks, it may be sufficient to analyze the about 3, 4, or 5 networks which seem most affected as may become apparent from e.g. expression data.

[0152] It is to be understood that a set of descriptors does not necessarily have to yield different signatures. Thus a chosen set of descriptors may only yield one signature. This will thus indicate that the disease examined has only one discrete disease-specific state. Of course, this assumes that the analysis has been performed with a comprehensive set of sample covering all relevant types of a disease such as samples for clear cell, papillary and chromophobe RCC. The skilled person will know how to select a sufficient number of samples in order to be sure that the majority of all relevant subtypes of a disease have been covered for the analysis.

[0153] Of course, a given set of descriptors may also yield multiple signatures such as 2, 3, 4, 5 or more signatures. The number of signatures will indicate the number of discrete disease-specific states that can be observed on this level of resolution for a disease. For example, if one analyzes a comprehensive set of samples for small-cell lung cancer and identifies e.g. three signatures, this means that small cell lung cancer can be characterized by three discrete disease-specific states. If one includes non-small cell lung cancer in the analysis, one may identify two additional signatures, which means that on the level of non-small and small cell lung cancer, these cancers can be classified into five discrete disease-specific states. The selection of the types of samples thus defines on which disease level one may observe discrete disease-specific states.

[0154] It is further important to understand that a given signature will unequivocally relate to a discrete disease-specific state. However, a discrete disease-specific state may be described through multiple signatures depending on what type and combination of descriptors have been used for identifying the signatures.

[0155] The approaches described above therefore provide just some out of numerous possibilities for identifying signatures and discrete disease-specific states. One may, for example, also use other clustering methods than two-way hierarchical clustering such as Biclustering. These methods have in common that they bring samples of e.g. tumors with similar traits together. The finding of the invention is that these “aligned groups of samples” which may be groups of tumors can then be considered as discrete disease specific states which can be used to characterize a disease.

[0156] In general, one can identify groups by grouping samples according to the similarity of a parameter which is attributable to a descriptor (such as expression) over a complete set or over a subset of genes or gene-associated molecules, wherein the similarity is preferably measured using a statistical distance measure such as Euclidian distance, Pearson correlation, Spearman correlation, or Manhattan distance.

[0157] However, as the approaches which are mentioned above and which rely e.g. on two-way hierarchical clustering, make use of parameters that are easily accessible and testable on a large scale (e.g. expression on the RNA or protein level), they provide an important tool to identify the number of discrete disease-specific states for a given resolution as well as to identify signatures describing these states.

[0158] Once one has identified a number of signatures for a set of descriptors such as by the above-described methods one can further reduce the number of descriptors, which are necessary to distinguish best between different signatures.

[0159] To this end, one may analyze samples for which one knows the disease specific states from the above analysis for descriptors that allow the best differentiation of different discrete disease specific states. These descriptors do not necessarily have to be those which led initially to the identification of discrete disease specific stages.

[0160] For example, once one has identified discrete specific states for disease-specific samples such as tumor samples by the aforementioned methods making e.g. use of expression data for genes, one may analyze samples for which one knows the discrete disease specific states for expression across all approximately 24.000 genes. One can then select the genes which are most differentially regulated between the samples of different discrete disease specific states and may use these expression patterns as signatures. This sort of analysis may be performed by micro array expression analysis.

[0161] For example, in the examples expression data of 92 genes, i.e. descriptors allowed identification of three signatures and thus of three discrete disease-specific states A, B, and C for RCCs (see FIG. 3). In a further analysis, the samples, for which it was then known whether they are of discrete disease specific state A, B or C, were analyzed for expression of approximately 20.000 genes using the Affymetrix gene chip. The software was then used to identify the genes which are most differentially regulated between sample of discrete disease specific states A, B or C. It turns out that by looking at certain gene lists (see below), one can initially best allocate samples to the discrete RCC specific states B and AC which stands for A and C. The state AC can then be further distinguished into A and C by looking at additional genes.

[0162] Using this approach a set of about 50 genes was identified. Overexpression of about 34 of these genes (table 1) and underexpression of about 16 of these genes allows for optimal distinction between state B vs. A and C. Another analysis revealed that overexpression of a group of about 4 (table 3) genes and underexpression of a group of about 19 genes (table 4) is well suited for distinguishing states A and C. These genes do not necessarily are the same as the about 92 genes which originally allowed for identification of the discrete disease specific states.

[0163] It is to be understood that the term “genes” in the context of tables 1, 2, 3 and 4 refers to the probes on the Affymetrix gene chip. Tables 1, 2, 3 and 4 all name the Probe Identifiers which allow a clear identification. Where a DNA or amino acid sequence is known for a Probe Identifier is known, this has been indicated. All statements hereinafter which relate to table 1, 2, 3 and 4 preferably only include those genes where the DNA and/or amino acid sequence is known.

[0164] In order to identify state B with a reliability of about 50% or more, it is for example sufficient to test for the over- or underexpression of at least one gene of table 1 or 2, respectively. In order to identify state B with a reliability of about 80% or more, it may be sufficient to test for the over- or underexpression of at least two genes of table 1 or 2, respectively. In order to identify state B with a reliability of about 90% or more, it may be sufficient to test for the over- or underexpression of at least three genes of table 1 or 2, respectively. In order to identify state B with a reliability of about 95% or more, it may be sufficient to test for the over- or underexpression of at least five genes of table 1 or 2, respectively. In order to identify state B with a reliability of about 99% or more, it may be sufficient to test for the over- or underexpression of at least six genes of table 1 or 2, respectively.

[0165] In order to identify state A vs. C with a reliability of about 50% or more, it is for example sufficient to test for the over- or underexpression of at least two genes of table 3 or 4, respectively. In order to identify state A vs. C with a reliability of about 70% or more, it may be sufficient to test for the over- or underexpression of at least three genes of table 3 or 4, respectively. In order to identify state A vs. C with a reliability of about 80% or more, it may be sufficient to test for the over- or underexpression of at least four genes of table 3 or 4, respectively. In order to identify state A vs. C with a reliability of about 90% or more, it may be sufficient to test for the over- or underexpression of at least five genes of table 3 or 4, respectively. In order to identify state A vs. C with a reliability of about 95% or more, it may be sufficient to test for the over- or underexpression of at least six genes of table 3 or 4, respectively. In order to identify state A vs. C with a reliability of about 99% or more, it may be sufficient to test for the over- or underexpression of at least seven genes of table 3 or 4, respectively.

[0166] In order to identify a set of descriptors, which allows best distinguishing different signatures and thus discrete states, one can use the SAM software (12) and set an at least a 2-fold change in the expression level as a selection parameter. If one wants to increase the preciseness of the signatures and at the same time to reduce the number of descriptors which is used to differentiate between different signature, one can the threshold higher such as 3, 4, 5 or more.

[0167] It is to be noted that the invention wherever it mentions methods of identifying discrete disease-specific states, signatures etc. always considers that the quality and/or quantity of descriptors has to be tested. This testing may include technical means such as use of e.g. micro-arrays to determine expression of genes. If the invention considers applying such methods by relying on and using data which are indicative of the quality and/or quantity of descriptors and which are deposited in e.g. databases after they have been determined using technical means, these methods will be run on technical devices such as a computer. All methods as they are described herein for identifying discrete disease-specific states, signatures etc. may therefore be performed in a computer-implemented way.

[0168] As will become apparent from the examples, the discrete disease-specific states, which were identified for RCCs can also be found to some extent in other hyper-proliferative diseases.

[0169] The aforementioned methods are thus suitable to identify a comprehensive set of signatures and thus discrete disease-specific states within a set of samples such as patient samples for hyper-proliferative diseases or cell lines of hyper-proliferative diseases. The signature and states can then be correlated to clinically relevant parameters such as average survival time and thus allow a clinically important characterization of diseases by easily accessible parameters such as expression data. It is, however, new that such signatures do not necessarily correlate with phenotypic histological characterization of the respective disease but rather seem to describe discrete states on e.g. the molecular level that characterize the disease development.

[0170] As pointed out above, these discrete disease-specific states allow obviously for some change (e.g. mutations, de-regulation etc.) until a threshold level is reached and switching to another discrete disease-specific state occurs.

[0171] It is currently not clear whether e.g. the three states of RCCs represent consecutive states such that first state A occurs which switches then to state B and then to state C or whether these states occur in parallel or are a combination of consecutives and parallel development. The important aspect, however, is that e.g. hyper-proliferative diseases such as RCCs occur in discrete states which can be linked to clinically relevant parameters such as survival time. One can for example test whether chemical compounds are capable of switching cell from a state being correlated with short survival time to a state being correlated to long survival time. This will be explained in more detail below.

[0172] Further, the signatures and states, which were found to characterize a disease, can be used to characterize other diseases. This, for example may allow predicting the efficacy of a pharmaceutically active compound for different disease if these diseases can be characterized by the same states.

[0173] In the following, we will set forth in detail that signatures and discrete disease-specific states can be used for diagnostic, prognostic, analytical and therapeutic purposes. These aspects will be discussed in parallel for discrete disease-specific states and signatures as if these terms were interchangeable. It has, however, to be born in mind that a discrete disease-specific state can be described through various signatures depending on the type and combinations of descriptors chosen. If in the following the term signature is used this is thus meant to incorporate all signatures that can be used to describe a single discrete disease-specific state. Further, all embodiments, which are discussed for signatures, equally apply to discrete disease-specific states.

[0174] The invention as mentioned relates to discrete disease-specific states for use as a diagnostic and/or prognostic marker in classifying samples from patients, which are suspected of being afflicted by a disease, optionally by a hyper-proliferative disease. The invention also relates to discrete disease-specific states for use as a diagnostic and/or prognostic marker in classifying cell lines of a disease, optionally of a hyper-proliferative disease. The invention further relates to discrete disease-specific states for use as a target for development of pharmaceutically active compounds.

[0175] The invention also relates to signatures for use as a diagnostic and/or prognostic marker in classifying samples from patients, which are suspected of being afflicted by a disease, optionally by hyper-proliferative disease wherein the signature comprises a qualitative and/or quantitative pattern of at least one descriptor and wherein the signature is indicative of a discrete disease-specific state. As for states, the invention also relates to signatures for use as a diagnostic and/or prognostic marker in classifying cell lines of a disease, optionally of a hyper-proliferative disease wherein the signature comprises a qualitative and/or quantitative pattern of at least one descriptor and wherein the signature is indicative of a discrete disease-specific state. Further, the invention relates to signatures for use as a read out for a target in the development, identification and/or application of pharmaceutically active compounds, wherein the signature comprises a qualitative and/or quantitative pattern of at least one descriptor and wherein the signature is indicative of a discrete disease-specific state. The target may be the discrete disease specific state which is reflected by the signature.

[0176] As mentioned above, a discrete disease specific state can be described by way of one or more signatures comprising at least two descriptors, which have been identified by comparing at least two regulatory networks in at least two patient derived-samples or cell lines.

[0177] The discrete disease-specific states and signatures relating thereto can be used for diagnostic purposes. Thus, samples of patients suffering from a disease such as a hyper-proliferative disease may be analyzed for their discrete disease-specific states and classified accordingly. The importance of discrete disease-specific states for classifying samples and thus for diagnosing patients become clear from the experiments on RCCs.

[0178] These examples show that it may be more informative to differentiate RCCs based on their discrete disease-specific state than by their phenotypic classification such as papillary, clear cell and chromophobe RCCs. In fact, the experiments show that papillary RCC samples, which were derived from different patients, may differ with respect to their discrete disease specific states. At the same time different papillary and clear cell RCCs may be characterized by the same discrete disease-specific state.

[0179] Thus, even though tumors may look comparable on the histological level, they may differ in terms of the underlying molecular mechanisms. Conversely, tumors may show different histological properties but still share the same underlying molecular mechanism in term of a discrete disease specific state. Given that the three discrete disease specific states, which could be identified for RCCs, clearly correlate with average survival time, classifying samples not e.g. according to their histological properties but according to their discrete disease-specific molecular state provides a new important classification scheme. Further, the knowledge about discrete disease specific states can help to diagnose ongoing disease development in samples obtained from patients early on at a point in time where histological changes or other phenotypic properties are not discernible yet.

[0180] The present invention in one aspect thus relates to a method of diagnosing, stratifying and/or screening a disease, optionally a hyper-proliferative disease in at least one patient, which is suspected of being afflicted by a disease, optionally by a hyper-proliferative disease or in at least one cell line of a disease, optionally of a hyper-proliferative disease comprising at least the steps of:

[0181] a. Providing a sample of a human or animal individual which is suspected of being afflicted by said disease;

[0182] b. Testing said sample for a signature;

[0183] c. Allocating a discrete disease-specific state to said sample based on the signature determined in step b.).

[0184] The sample may be a tumor sample.

[0185] There may be different ways to test for a signature. If the signature is not known yet, one may identify it as described above. If the signature is already known, one can test for it by analyzing the quality and/or quantity of descriptors that were used for identification of the signature. One can also use optimized signatures which allow best differentiation between different states. If for example the signature is based on expression data for a set of given genes or gene-associated molecules such as RNAs or proteins, one can test for a signature by simply determining the expression pattern for this set of molecules. This may be done by standard methods such as by micro-array expression analysis.

[0186] If one has identified the signature, one also knows the discrete disease specific state which correlates with this signature. Using such methods one can thus classify patient samples by common molecular mechanisms that lead to the same discrete disease specific molecular states. If such discrete disease specific states occur before phenotypic changes become apparent, it is thus possible to diagnose a hyper-proliferative disease such as RCC early on.

[0187] Preferably, “discrete disease specific states, substates or levels” are used as a new stratifying tool for categorizing diseases which otherwise are diagnosed on a general level.

[0188] Thus, the invention preferably relates in one embodiment to identifying discrete disease specific states, substates, levels, etc. by analyzing disease such as hyper-proliferative disease for signatures being indicative of discrete disease specific states, substates and levels as described above. This analysis will be performed for a specific type of hyper-proliferative disease such as e.g. RCC, lung cancer, breast cancer etc. Thus, the diseases may be identified by common selection criteria such as the organs being affected. However, initially no attention will be given to sub-classifications of these hyper-proliferative diseases, which are based on e.g. histological classification schemes. Once one has identified different discrete disease specific states for a disease like e.g. RCCs, one can test samples as described above for ongoing disease development already at a point in time when no phenotypic changes are recognizable. The discrete disease specific state therefore usually allows one to directly predict which sub-type of the disease in question is developing (e.g. state A, B, or C for RCC). These subtypes are correlated with e.g. clinically relevant parameters such as survival time. Thus, the term discrete disease specific state, substate or level preferably allows distinguishing different subtypes of a disease according to a new classification scheme, which links the subtype to clinically or pharmacologically important parameters. The finding of the present invention that discrete disease specific states exist in diseases and can be correlated with subtypes that are characterized not necessarily by their histological properties but by clinically or pharmacologically relevant parameters thus allows deciphering disease through a new code which is based on the discrete disease specific states, substates and levels.

[0189] The knowledge that discrete disease-specific states exist e.g. in RCC and other hyper-proliferative diseases can also be used to stratify patient cohorts undergoing clinical trials for new treatments of RCC or other hyper-proliferative diseases. As mentioned herein, certain pharmaceutically active agents may act only on specific discrete disease-specific states. If a patient cohort which undergoes a clinical trial with such an active agent consists mainly of individuals with other discrete disease-specific states, any effects of the pharmaceutically active agent on the specific discrete disease-specific state may not be discernible. Such effects may become, however, statistically significant if the patient cohort is grouped according to the discrete disease-specific states. Thus, the knowledge on the existence of discrete disease-specific states can be used to stratify test populations undergoing clinical trials according to their discrete disease-specific states.

[0190] Further, once a discrete disease specific state is known, the knowledge about its existence can be used to test whether it also occurs as a subtype in different hyper-proliferative diseases. The discrete disease specific states, substates and levels and the signature relating thereto can thus be used to screen different diseases for the presence of these subtypes.

[0191] The classification of samples for their discrete disease specific states through identifying respective signatures can thus be used for diagnosing disease such as hyper-proliferative diseases. However, the classification of samples, be it of patients or cell lines for diseases such as hyper-proliferative diseases, for their discrete disease specific states has further implications.

[0192] Given that discrete disease specific states seem to reflect decisive stages of the underlying molecular disease mechanisms, they can be linked to relevant clinical and pharmacological parameters such as average survival times or responsiveness to drugs. This means that analyzing samples of patients for their respective discrete disease specific molecular states does not only allow diagnosing the type of the disease at an early point in time but also makes a prognosis possible as to the future course of the disease. Thus, one will early know whether a patient suffers from e.g. RCC and whether this RCC will be an aggressive or comparatively moderate form. This prognosis can then be used for therapeutic purposes when making decisions as to the kind of medication, physical treatment or surgery.

[0193] Further, the possibility of assigning a discrete disease specific state to samples allows analyzing the effectiveness of treatments with specific drugs. For example, one can test a patient or a population of patients suffering from a hyper-proliferative disease for (i) their reaction towards treatment with a pharmaceutically active agent and (ii) for their discrete disease specific molecular state. The reaction towards treatment may be measured by e.g. the quality of and quantity of clinical improvement. One can then try to correlate such responders towards treatment with discrete disease specific states. If it turns out that patients for which the disease is characterized by a specific discrete disease specific state react more favorably towards treatment, these patients show a higher responsiveness towards treatment.

[0194] The invention in one aspect thus relates to a method of determining the responsiveness of at least one human or animal individual which is suspected of being afflicted by a disease, optionally by a hyper-proliferative disease towards a pharmaceutically active agent comprising at least the steps of:

[0195] a. Providing a sample of at least one human or animal individual which is suspected of being afflicted by a disease before the pharmaceutically active agent is administered;

[0196] b. Testing said sample for a signature;

[0197] c. Allocating a discrete disease-specific state to said sample based on the signature determined;

[0198] d. Determining the effect of a pharmaceutically active compound on the disease symptoms and/or the discrete-disease specific state in said individual;

[0199] e. Identifying a correlation between the effects on disease symptoms and/or the discrete disease-specific state and the initial discrete disease-specific state of the sample.

[0200] The signature may be tested for as described above. The sample may be a tumor sample.

[0201] Being able to predict the responsiveness of e.g. patients with a discrete disease specific state towards treatment is helpful in many aspects. For example, if such responsiveness is known, one can pre-select patients for treatment. Identification of signatures and discrete disease specific states can thus serve as companion diagnostics, which allow pre-selecting patients for effective treatment. Tools for identifying patients that will respond to a particular treatment become more and more important with public health systems requiring such tests in order to reimburse expensive therapies. Being able to predict whether a specific group of patients which is characterized by their discrete disease specific states will react favorably towards a specific pharmaceutically active agent is also important for other areas. For example, a lot of drugs receive their initial marketing authorization from regulatory agencies such as the FDA for a specific indication only. Frequently, one then tries to test whether such drugs are also effective for treating other diseases. Such clinical trials are, however, extremely costly.

[0202] If one knew upfront that only patients with a specific discrete disease specific state have reacted positively towards a specific drug and if one now tests this drug for other diseases, one will be able to conduct such clinical trials with a significantly smaller patient group by selecting only patients with the discrete disease specific profile which has shown a positive response when patients with the same state were tested albeit for a different disease. These clinical trials will not only be less costly in view of the smaller test population, they are also likely to lead to a positive outcome as the effects of the treatment may be more pronounced and thus more easily discernible by statistical methods as the signal-to-noise ratio will be improved.

[0203] Being able to predict the responsiveness of a treatment also forms part of the prognostic aspects of the invention.

[0204] The invention in one embodiment thus relates to a method of predicting the responsiveness of at least one patient which is suspected of being afflicted by a disease, optionally by a hyper-proliferative disease towards a pharmaceutically active agent comprising at least the steps of:

[0205] a. Determining whether a correlation exists between effects on disease symptoms and/or discrete disease-specific states and the initial discrete disease-specific states as a consequence of administration of a pharmaceutically active agent as described above;

[0206] b. Testing a sample of a human or animal individual which is suspected of being afflicted by a disease, optionally by a hyper-proliferative disease for a signature;

[0207] c. Allocating a discrete disease-specific state to said sample based on the signature determined;

[0208] d. Comparing the discrete disease-specific state of the sample in step c. vs. the discrete disease-specific state for which a correlation has been determined in step a.);

[0209] e. Predicting the effect of a pharmaceutically active compound on the disease symptoms in said patient.

[0210] The sample may be a tumor sample.

[0211] The finding that diseases such as hyper-proliferative diseases are characterized by discrete disease specific states also allows new approaches for development and/or identification of new therapeutically active agents.

[0212] As mentioned above, samples from patients can be characterized as to their discrete disease specific states. Further, cell lines of diseases may also display such discrete disease specific states. It is assumed that a pharmaceutically active agent towards which a patient with a discrete disease specific state is responsive may in some instances induce a switch to another discrete disease specific sate. This other discrete disease specific state may either be a completely new discrete disease specific state or it may be a discrete disease specific state, which has been found in other patients. For example, a pharmaceutically active agent may induce a switch from a discrete disease specific state which is correlated with low average survival times to a discrete disease specific state which is correlated with a longer average survival time. The discrete disease specific states and signatures relating thereto may be identified as described above.

[0213] If indeed a pharmaceutically active agent is capable of inducing a switch of discrete disease specific states, one can use discrete disease specific states and the signatures relating thereto as a read-out parameter for the potential effectiveness of pharmaceutically active agents. The target on which the pharmaceutically active agent would act is thus the discrete disease specific state. The discrete disease specific states are thus considered to targets of pharmaceutically active agents.

[0214] The invention in one embodiment therefore relates to a method of determining the effects of a pharmaceutically active compound, comprising at least the steps of:

[0215] a. Providing a sample of at least one human or animal individual which is suspected of being afflicted by a disease, optionally by a hyper-proliferative disease or a cell line of a disease, optionally of a hyper-proliferative disease before a pharmaceutically active agent is applied;

[0216] b. Testing said sample or cell line for a signature;

[0217] c. Allocating a discrete disease-specific state to said sample or cell line based on the signature determined;

[0218] d. Testing said sample or cell line for a signature after the pharmaceutically active agent is applied;

[0219] e. Allocating a discrete disease-specific state to said sample or cell line based on the signature determined;

[0220] f. Comparing the discrete disease-specific states identified in steps c.) and e.).

[0221] The sample may be a tumor sample.

[0222] The effects that are determined by this method may e.g. allow identification of compounds which may have a positive influence on the disease if e.g. a switch to a discrete disease specific state correlated with a more favorable clinical parameter such as increased survival time is observed. The methods may, however, also allow identification of toxic compounds if these compounds induce a switch to a discrete disease specific state correlated with a less favorable clinical parameter such as decreased survival time. These methods may thus be used as assays in the development, identification and/or screening of potential pharmaceutically active compounds, e.g. to determine the potential effectiveness of a pharmaceutically active compound in a disease such as a hyper-proliferative disease. These assays may also be used for determining the toxicity of a pharmaceutically active compound.

[0223] Such discrete state-related assay systems for active and/or toxic drug candidates could be of enormous value to identify new pharmaceuticals. With the reasonable assumption that certain discrete states of a tumor are not just indicative for the status of being a hyper-proliferating cell but also being related e.g. to the aggressiveness of a tumor or survival time of a patient, the switch in state monitored by switch in signature marks an interesting screening system as a general “read out” for changing a tumor status. So the “read out” is related to functional efficacy rather than blocking a certain molecular target not necessarily being related to tumor function. Such screening system would simply pick up any compound switching the state irrespective of the molecular target of interaction. Such screening resembles assays interfering with virus propagation in cell cultures rather than screening for inhibitors of a certain viral enzyme just as reverse transcriptase.

[0224] On the other hand such assays could be indicative for the tumorgenicity of compounds turning a status characteristic for a healthy cell into a status characteristic for the status of a hyperproliferative cell.

[0225] For example, expression analysis has been performed for HS 294T cells. After administration of 5 mM acetyl cysteine at 6 hours, expression analysis revealed presence of a discrete disease specific state corresponding to state B of RCCs. This state could not be detected before administration. This indicates that acetyl cystein may induce a switch to this state B in the HS 294T cells.

[0226] Similarly, expression analysis has been performed for human malignant peripheral nerve sheath tumor (90-8) cells. These cells were infected with G207, an ICP34.5-deleted oncolytic herpes simplex virus (oHSV). After infection, expression analysis revealed presence of a discrete disease specific state corresponding to state B of RCCs. This state could not be detected before infection. This indicates that oHSV may induce a switch to this state B in the 90-8 cells.

[0227] Compounds such as mevalonate, UO126, MK886, deferoxamine, paclitaxel may have similar effects.

[0228] The finding of discrete disease specific states as being characteristic for diseases thus allows for various diagnostic, prognostic, therapeutic, screening and developmental approaches. In most of these approaches, one uses signatures as a read-out parameter for the presence of a discrete disease specific state. Of course, one will aim to use signatures, which can be easily and reliably be determined.

[0229] Therefore, one may preferably use signatures, wherein genes or gene-associated molecules such as RNA and proteins are used as descriptors and wherein the expression pattern thereof serves as a signature. The advantage of this approach is that one can rely on common micro-array expression profiling for identifying signatures. Further, one can use existing expression data from micro-array analysis for identifying relevant signatures and states by making use of the aforementioned identification methods.

[0230] As mentioned hereinafter, three different discrete disease specific states have been identified for RCC. Further, these states were found at least to some degree in other hyper-proliferative diseases such as ovarian carcinoma. These states can be described by signatures, which are based on expression data.

[0231] As this data provides a reliable and straightforward read-out, the present invention relates in one embodiment to a signature for use as diagnostic and/or prognostic marker in the classification of a disease such as a hyper-proliferative disease, preferably of cancers, more preferably of renal cell carcinoma, or for use as read out of a target for developing, identifying and/or screening of a pharmaceutically active compound, wherein the signature is characterized by:

[0232] a. an overexpression of at least one gene of table 1, and/or

[0233] b. an underexpression of at least one gene of table 2.

[0234] The presence of this signature will be indicative of a discrete disease-specific state at least in RCC, which is indicative of an intermediate average survival time where about 45 to about 55% such as about 50% of patients can be expected to live after 60 months. Preferably, the presence of this signature will be indicative of a discrete disease-specific state at least in RCC, which is indicative of an intermediate average survival time where about 40 to about 50% such as about 45% of patients can be expected to live after 90 months.

[0235] Such a signature is characterized by:

[0236] a. an overexpression of at least one gene of table 1, and/or

[0237] b. an underexpression of at least one gene of table 2, and wherein determination of the over- and/or underexpression of at least one gene of table 1 and table 2 respectively allows assigning a discrete disease-specific state with a likelihood of ≧50%.

[0238] Such a signature is characterized by:

[0239] a. an overexpression of at least one gene of table 1, and/or

[0240] b. an underexpression of at least one gene table 2, and wherein determination of the over- and/or underexpression of at least two genes of table 1 and table 2 respectively allows assigning a discrete disease-specific state with a likelihood of ≧80%.

[0241] Such a signature is characterized by:

[0242] a. an overexpression of at least one gene of table 1, and/or

[0243] b. an underexpression of at least one gene table 2, and wherein determination of the over- and/or underexpression of at least three genes of table 1 and table 2 respectively allows assigning a discrete disease-specific state with a likelihood of ≧90%.

[0244] Such a signature is characterized by:

[0245] a. an overexpression of at least one gene of table 1, and/or

[0246] b. an underexpression of at least one gene table 2, and wherein determination of the over- and/or underexpression of at least four genes of table 1 and table 2 respectively allows assigning a discrete disease-specific state with a likelihood of ≧95%.

[0247] Such a signature is characterized by:

[0248] a. an overexpression of at least one gene of table 1, and/or

[0249] b. an underexpression of at least one gene table 2, and wherein determination of the over- and/or underexpression of at least five genes of table 1 and table 2 respectively allows assigning a discrete disease-specific state with a likelihood of ≧99%.

[0250] It is to be understood that even though analysis of a single gene of table 1 or table 2 may be sufficient for assigning the discrete disease-specific state, the likelihood of a correct assignment will increase if more genes are analyzed. Thus, the signature also includes analysis for the overexpression of at least 2, 3, 4, 5, 6, 7, 8, 9, 10, 11, 12, 13, 14, 15, 16, 17, 18, 19, 20, 21, 22, 23, 24, 25, 26, 27, 28, 29, 30, 31, 32, 33 or 34 genes of table 1 and/or the underexpression of at least 2, 3, 4, 5, 6, 7, 8, 9, 10, 11, 12, 13, 14, 15 or 16 genes of table 2. It may be most straightforward to look at the expression data of all genes of table 1 and/or table 2. By considering more than just one descriptor may allow to determine a signature and thus a discrete disease with a likelihood of at least about 50%, at least about 60%, at least about 70%, at least about 80%, at least about 90%, at least about 95%, at least about 98% or at least about 99%. Preferably the signatures are determined through analyzing 2, 3, 4, 5, 6, 7, 8, 9, or 10 genes of table 1 and/or table 2.

[0251] The present invention relates in one embodiment to a signature for use as diagnostic and/or prognostic marker in the classification of hyper-proliferative diseases such as cancers, preferably of renal cell carcinoma, or for use as target for development of pharmaceutically active compounds, wherein the signature is characterized by:

[0252] a. an overexpression of at least one gene of table 3, and/or

[0253] b. an underexpression of at least one gene of table 4.

[0254] The presence of this signature will be indicative of a discrete disease-specific state at least in RCC, which is indicative of a low average survival time where e.g. about 30% to about 45% such as about 40% of patients can be expected to live after 60 months. Preferably, the presence of this signature will be indicative of a discrete disease-specific state at least in RCC, which is indicative of an intermediate average survival time where about 5 to about 30% such as about 10% to 20% of patients can be expected to live after 90 months.

[0255] Such a signature is characterized by:

[0256] a. an overexpression of at least one gene of table 3, and/or

[0257] b. an underexpression of at least one gene of table 4, and wherein determination of the over- and/or underexpression of at least two genes of table 3 and table 4, respectively allows assigning a discrete disease-specific state with a likelihood of ≧50%.

[0258] Such a signature is characterized by:

[0259] a. an overexpression of at least one gene of table 3, and/or

[0260] b. an underexpression of at least one gene table 4, and wherein determination of the over- and/or underexpression of at least three genes of table 3 and table 4 respectively allows assigning a discrete disease-specific state with a likelihood of ≧70%.

[0261] Such a signature is characterized by:

[0262] a. an overexpression of at least one gene of table 3, and/or

[0263] b. an underexpression of at least one gene table 4, and wherein determination of the over- and/or underexpression of at least four genes of table 3 and table 4 respectively allows assigning a discrete disease-specific state with a likelihood of ≧80%.

[0264] Such a signature is characterized by:

[0265] a. an overexpression of at least one gene of table 3, and/or

[0266] b. an underexpression of at least one gene table 4, and wherein determination of the over- and/or underexpression of at least five genes of table 3 and table 4 respectively allows assigning a discrete disease-specific state with a likelihood of ≧90%.

[0267] Such a signature is characterized by:

[0268] a. an overexpression of at least one gene of table 3, and/or

[0269] b. an underexpression of at least one gene table 4, and wherein determination of the over- and/or underexpression of at least six genes of table 3 and table 4 respectively allows assigning a discrete disease-specific state with a likelihood of ≧95%.

[0270] Such a signature is characterized by:

[0271] a. an overexpression of at least one gene of table 3, and/or

[0272] b. an underexpression of at least one gene table 4, and wherein determination of the over- and/or underexpression of at least seven genes of table 3 and table 4 respectively allows assigning a discrete disease-specific state with a likelihood of ≧99%.

[0273] It is to be understood that even though analysis of a single gene of table 3 or table 4 may be sufficient for assigning the discrete disease-specific state the likelihood of a correct assignment will increase if more genes are analyzed. Thus, the signature also includes analysis for the overexpression of at least 2, 3, or 4 genes of table 3 and/or the underexpression of at least 2, 3, 4, 5, 6, 7, 8, 9, 10, 11, 12, 13, 14, 15, 16, 17, 18 or 19 genes of table 4. It may be most straightforward to look at the expression data of all genes of table 3 and/or table 4. By considering more than just one descriptor may allow to determine a signature and thus a discrete disease with a likelihood of at least about 50%, at least about 60%, at least about 70%, at least about 80%, at least about 90%, at least about 95%, at least about 98% or at least about 99%. Preferably the signatures are determined through analyzing 2, 3, 4, 5, 6, 7, 8, 9, or 10 genes of table 3 and/or table 4.

[0274] The present invention relates in one embodiment to a signature for use as diagnostic and/or prognostic marker in the classification of hyper-proliferative diseases such as cancers, preferably of renal cell carcinoma, or for use as target for development of pharmaceutically active compounds, wherein the signature is characterized by:

[0275] a. an underexpression of at least one gene of table 3, and/or

[0276] b. an overexpression of at least one gene of table 4.

[0277] The presence of this signature will be indicative of a discrete disease-specific state at least in RCC, which is indicative of a high average survival time where about 70 to about 90% such as about 80% of patients can be expected to live after 60 months. Preferably, the presence of this signature will be indicative of a discrete disease-specific state at least in RCC, which is indicative of an intermediate average survival time where about 60 to about 80% such as about 70% of patients can be expected to live after 90 months.

[0278] Such a signature is characterized by:

[0279] a. an underexpression of at least one gene of table 3, and/or

[0280] b. an overexpression of at least one gene of table 4, and wherein determination of the under- and/or overexpression of at least two genes of table 3 and table 4, respectively allows assigning a discrete disease-specific state with a likelihood of ≧50%.

[0281] Such a signature is characterized by:

[0282] a. an underexpression of at least one gene of table 3, and/or

[0283] b. an overexpression of at least one gene table 4, and wherein determination of the under- and/or overexpression of at least three genes of table 3 and table 4 respectively allows assigning a discrete disease-specific state with a likelihood of ≧70%.

[0284] Such a signature is characterized by:

[0285] a. an underexpression of at least one gene of table 3, and/or

[0286] b. an overexpression of at least one gene table 4, and wherein determination of the under- and/or overexpression of at least four genes of table 3 and table 4 respectively allows assigning a discrete disease-specific state with a likelihood of ≧80%.

[0287] Such a signature is characterized by:

[0288] a. an underexpression of at least one gene of table 3, and/or

[0289] b. an overexpression of at least one gene table 4, and wherein determination of the under- and/or overexpression of at least five genes of table 3 and table 4 respectively allows assigning a discrete disease-specific state with a likelihood of ≧90%.

[0290] Such a signature is characterized by:

[0291] a. an underexpression of at least one gene of table 3, and/or

[0292] b. an overexpression of at least one gene table 4, and wherein determination of the under- and/or overexpression of at least six genes of table 3 and table 4 respectively allows assigning a discrete disease-specific state with a likelihood of ≧95%.

[0293] Such a signature is characterized by:

[0294] a. an underexpression of at least one gene of table 3, and/or

[0295] b. an overexpression of at least one gene table 4, and wherein determination of the under- and/or overexpression of at least seven genes of table 3 and table 4 respectively allows assigning a discrete disease-specific state with a likelihood of ≧99%.

[0296] It is to be understood that even though analysis of a single gene of table 3 or table 4 may be sufficient for assigning the discrete disease-specific state the likelihood of a correct assignment will increase if more genes are analyzed. Thus, the signature also includes analysis for the underexpression of at least 2, 3 or 4 genes of table 3 and/or the overexpression of at least 2, 3, 4, 5, 6, 7, 8, 9, 10, 11, 12, 13, 14, 15, 16, 17, 18 or 19 genes of table 4. It may be most straightforward to look at the expression data of all genes of table 3 and/or table 4. By considering more than just one descriptor may allow to determine a signature and thus a discrete disease with a likelihood of at least about 50%, at least about 60%, at least about 70%, at least about 80%, at least about 90%, at least about 95%, at least about 98% or at least about 99%. Preferably the signatures are determined through analyzing 2, 3, 4, 5, 6, 7, 8, 9, or 10 genes of table 3 and/or table 4.

[0297] These signatures and the discrete disease specific states relating thereto can preferably be used for the aforementioned diagnostic, therapeutic and prognostic purposes in the context of RCC. However, as these signatures and states were also identified in bladder cancer, breast cancer, ovarian cancer, myeloma, colorectal cancer, large cell lymphoma, oral squamous cell carcinoma, cervical squamous cell carcinoma, thyroid cancer, adenocarcinoma, they may also be used for the above purposes in the context of these cancer types.

[0298] Signature of high, intermediate and low survival time as mentioned above (e.g. about 80% after 90 months) may be determined for RCCs as well as the preceding cancers by analyzing the expression of the genes CD34 (SEQ ID Nos.: 780 (DNA sequence), 781 (amino acid sequence)), DEK (SEQ ID Nos.: 782 (DNA sequence), 783 (amino acid sequence)) and MSH 6 (SEQ ID Nos.: 784 (DNA sequence), 785 (amino acid sequence)).

[0299] A discrete state with high survival time can be identified by high expression of CD34, low to high expression of DEK and low to high expression of MSH6. A discrete state with intermediate survival time can be identified by low to high expression of CD34, no expression of DEK and no expression of MSH6. A discrete state with low survival time can be identified by low expression of CD34, low to high expression of DEK and low to high expression of MSH6. These signatures may be used in all embodiments as described herein.

[0300] As already mentioned above, the present invention hinges on the finding that hyper-proliferative diseases such as renal cell carcinoma seem to exist in different discrete disease-specific states. Three such discrete disease-specific states have originally been identified for renal cell carcinoma (RCC) using a two times, two-way hierarchical clustering approach. In the first step, differentially expressed genes within a distinct tumor cohort, which are however commonly deregulated for some but not for all tumors of this cohort, were identified (see FIGS. 2A to 2D). In a second step, these genes enabling a differentiation between tumor sub-groups were picked and combined into a matrix for the second two-way hierarchical clustering step against the same tumor cohort. For the case of RCC, this revealed three discrete disease specific states which were labeled A, B, and C 8 (see FIG. 3). Some of these states were identified in other tumors (see FIG. 4). For RCC, certain genes were identified as being suitable descriptors (see above and e.g. Tables 1 to 4). The expression profile of these genes yields different signatures indicative of the three afore-mentioned states.

[0301] With this knowledge at hand, computer-implemented, algorithm based approaches were undertaken to identify further sets of genes which allow characterization of RCC by its three discrete disease-specific states.

[0302] These computer-implemented, algorithm based approaches which are described in the following led to the identification of approximately 454 genes depicted in Table 10, the expression patterns of which can be used to distinguish between the discrete RCC specific states B vs AC. The expression pattern of another set of approximately 195 genes which are depicted in Table 11 can be used to distinguish between the discrete RCC specific states A vs C. In the following, the implications of these results are set forth. Then, the computer-implemented, algorithm based approaches are explained in further detail.

[0303] As mentioned, the expression pattern of about 454 genes, which are listed in Table 10, can be used to unambiguously identify one of the three discrete RCC specific states which for sake of nomenclature has been named B herein. More precisely, if genes 1 to 286 of Table 10 are found to be overexpressed and if genes 287 to 454 of Table 10 are found to be underexpressed for a sample of a human or animal individual, the individual will be characterized as having the discrete RCC specific state B. As mentioned before this state is indicative of an intermediate average survival time where about 45 to about 55% such as about 50% of patients can be expected to live after 60 months. Preferably, the presence of this signature will be indicative of a discrete disease-specific state in RCC, which is indicative of an intermediate average survival time where about 40 to about 50% such as about 45% of patients can be expected to live after 90 months.

[0304] If, however, it is found that genes 1 to 286 of Table 10 are underexpressed and that genes 287 to 454 of Table 10 are overexpressed, the individual can be diagnosed to display one of the remaining two discrete RCC-specific states, namely A or C.

[0305] In order to determine whether such an individual displays states A or C, the expression pattern of the genes listed in Table 11 can be examined. If genes 1 to 19 of Table 11 are overexpressed and if genes 20 to 195 of Table 11 are underexpressed, the individual will display state C which is indicative of a low average survival time where e.g. about 30% to about 45% such as about 40% of patients can be expected to live after 60 months. Preferably, the presence of this signature will be indicative of a discrete disease-specific state in RCC, which is indicative of an intermediate average survival time where about 5 to about 30% such as about 10% to 20% of patients can be expected to live after 90 months.

[0306] If, however, genes 1 to 19 of Table 11 are underexpressed and if genes 20 to 195 of Table 11 are overexpressed, the individual will display state A which is indicative of a high average survival time where about 70 to about 90% such as about 80% of patients can be expected to live after 60 months. Preferably, the presence of this signature will be indicative of a discrete disease-specific state in RCC, which is indicative of an intermediate average survival time where about 60 to about 80% such as about 70% of patients can be expected to live after 90 months.

[0307] Expression levels may be determined using the Affymetrix gene chips HG-U133A, HG-U133B, HG-U133_Plus_{—}2, etc. The decision as to whether a certain gene in a specific sample is over- or underexpressed will be taken in comparison to a control. This control will be either implemented in the software, or an overall median or other arithmetic mean across measurements is built. By implying a multitude of samples it is also conceivable to calculate a median and/or mean for each gene respectively. In relation to these results, a respective gene expression value is monitored as up or down-regulated.

[0308] It is to be understood that the RCC signatures as they are defined by the expression patterns of the genes of Tables 10 and 11 reflect the outcome of a statistical analysis across multiple samples.

[0309] For the methods of diagnosis, prognosis, stratification, determining responsiveness etc. as described herein, one will usually test samples obtained from an individual. On the individual level, the expression level of a single gene of Table 10 and/or 11 may not necessarily be sufficient to unambiguously allocate a discrete RCC specific state as the individual may not e.g. overexpress this single gene. Therefore, one will usually analyze the expression pattern of more than one gene of Tables 10 and 11.

[0310] Typically one will analyze the expression pattern of at least about 6, at least about 7, at least about 8, at least about 9, at least about 10, at least about 11, at least about 12, at least about 13, at least about 14, at least about 15, at least about 16, at least about 17, at least about 18, at least about 19 or at least about 20 genes of Table 10 to decide on whether the discrete RCC specific state being labeled herein as B is present or not. The analysis of the expression pattern of at least 6 genes of Table 10 will allow deciding whether state B or state A or C is present with a reliability of about 60% or more. This reliability will increase if more genes are analyzed. Thus, the analysis of the expression pattern of at least 10 genes of Table 10 will allow deciding whether state B or state A or C is present with a reliability of about 80% or more. The analysis of the expression pattern of at least 15 genes of Table 10 will allow deciding whether state B or state A or C is present with a reliability of about 90% or more and the analysis of the expression pattern of at least 20 genes of Table 10 will allow deciding whether state B or state A or C is present with a reliability of about 99% or more. The set of about 454 genes of Table 10 thus serves as a reservoir for the unambiguous characterization of state B. By analyzing the expression behavior of e.g. approximately 10 genes of this reservoir, one will be able to decide with a reliability of at least 80% (i) on whether a patient suffers from RCC and (ii) whether the patient suffers from cancer of state B or any of the two other states A or C which will allow to make a prognosis as to the average survival time. In order to differentiate between states A and C, one then has to analyze the expression pattern of genes of Table 11.

[0311] Similarly, one will analyze the expression pattern of at least about 6, at least about 7, at least about 8, at least about 9, at least about 10, at least about 11, at least about 12, at least about 13, at least about 14, at least about 15, at least about 16, at least about 17, at least about 18, at least about 19 or at least about 20 genes of Table 11 to decide on whether the discrete RCC specific state being labeled herein as A or C is present. The analysis of the expression pattern of at least 5 genes of Table 11 will allow deciding whether state A or C is present with a reliability of about 60% or more. This reliability will increase if more genes are analyzed. Thus, the analysis of the expression pattern of at least 10 genes of Table 11 will allow deciding whether state A or C is present with a reliability of about 80% or more. The analysis of the expression pattern of at least 15 genes of Table 11 will allow deciding whether state A or C is present with a reliability of about 90% or more and the analysis of the expression pattern of at least 20 genes of Table 11 will allow deciding whether state A or C is present with a reliability of about 99% or more.

[0312] The present invention thus relates to a signature, which can be derived from the expression pattern of at least about 6, at least about 7, at least about 8, at least about 9, at least about 10, at least about 11, at least about 12, at least about 13, at least about 14, at least about 15, at least about 16, at least about 17, at least about 18, at least about 19 or at least about 20 genes of Table 10. This signature will allow to unambiguously decide whether one of three discrete RCC specific states, namely state B is present. This signature is defined by an over expression of genes 1 to 286 and an underexpression of genes 287 to 454 of Table 10. The signature which is defined by an underexpression of genes 1 to 286 and an overexpression of genes 287 to 454 of Table 10 is indicative of the two other states of RCC, namely A or C.

[0313] The invention also relates to a signature, which can be derived from the expression pattern of at least about 6, at least about 7, at least about 8, at least about 9, at least about 10, at least about 11, at least about 12, at least about 13, at least about 14, at least about 15, at least about 16, at least about 17, at least about 18, at least about 19 or at least about 20 genes of Table 11. This signature will allow to unambiguously decide which of the two remaining discrete RCC specific states, namely states A or C is present. The signature which is defined by an over expression of genes 1 to 19 and an underexpression of genes 20 to 195 of Table 11 is indicative of state C. The signature which is defined by an underexpression of genes 1 to 19 and an overexpression of genes 20 to 195 of Table 11 is indicative of state A.

[0314] The present invention also relates to the above signatures for use as a diagnostic and/or prognostic marker in the context of RCC. By determining whether the signatures are present, one can take a decision as to whether a patient suffers from RCC as such and/or will likely develop RCC as such in the future. Further, one can distinguish between the aggressiveness of RCC development and adjust therapy accordingly. Further, the present invention relates to the above signatures for use in stratifying test populations for clinical trials for treatment of RCC.

[0315] Further, the present invention relates to the above signatures for use as a read out of a target for development, identification and/or screening of at least one pharmaceutically active compound in the context of RCC as described above.

[0316] The present invention also relates to the above signatures for use in stratifying human or animal individuals which are suspected to suffer from ongoing or imminent RCC development. Stratification allows to group these individuals by their discrete RCC specific states. Potential pharmaceutically active compounds which are assumed to be effective in RCC treatment can thus be analyzed in such pre-selected patient groups.

[0317] The present invention in one embodiment also relates to a method of diagnosing, prognosing, stratifying and/or screening renal cell carcinoma in at least one human or animal patient, which is suspected of being afflicted by said disease, comprising at least the steps of:

[0318] a. Providing a sample of a human or animal individual being suspected to suffer from renal cell carcinoma;

[0319] b. Testing said sample for a signature indicative of a discrete renal cell carcinoma specific state by determining expression of at least 6, preferably at least 10 genes of Table 10;

[0320] c. Allocating a discrete renal cell carcinoma specific state to said sample based on the signature determined in step b.).

[0321] Further, the present invention in one embodiment relates to a method of determining the responsiveness of at least one human or animal individual, which is suspected of being afflicted by renal cell carcinoma, towards a pharmaceutically active agent comprising at least the steps of:

[0322] a. Providing a sample of a human or animal individual being suspected to suffer from renal cell carcinoma before the pharmaceutically active agent is administered;

[0323] b. Testing said sample for a signature indicative of a discrete renal cell carcinoma specific state by determining expression of at least 6, preferably at least 10 genes of Table 10;

[0324] c. Allocating a discrete renal cell carcinoma-specific state to said sample based on the signature determined in step b.);

[0325] d. Determining the effect of the pharmaceutically active agent on the disease symptoms and/or discrete renal cell carcinoma-specific states in said individual;

[0326] e. Identifying a correlation between the effects on disease symptoms and/or discrete renal cell carcinoma-specific states and the initial discrete renal cell carcinoma-specific state of the sample as determined in step c).

[0327] In yet another embodiment, the invention relates to a method of predicting the responsiveness of at least one patient which is suspected of being afflicted by renal cell carcinoma, towards a pharmaceutically active agent comprising at least the steps of:

[0328] a. Determining whether a correlation between effects on disease symptoms and/or discrete renal cell carcinoma-specific states and the initial discrete renal cell carcinoma-specific state as a consequence of administration of a pharmaceutically active agent exists by using the above method;

[0329] b. Testing a sample of a human or animal individual patient which is suspected of being afflicted by renal cell carcinoma for a signature indicative of a discrete renal cell carcinoma specific state by determining expression of at least 6, preferably of at least 10 genes of Table 10;

[0330] c. Allocating a discrete disease-specific state to said sample based on the signature determined in step c.);

[0331] d. Comparing the discrete renal cell carcinoma-specific state of the sample in step c. vs. the discrete renal cell carcinoma-specific state for which a correlation has been determined in step a.);

[0332] e. Predicting the effect of a pharmaceutically active compound on the disease symptoms in said patient.

[0333] One embodiment of the invention relates to a method of determining the effects of a potential pharmaceutically active agent for treatment of renal cell carcinoma, comprising at least the steps of:

[0334] a. Providing a sample of a human or animal individual being suspected to suffer from renal cell carcinoma before a pharmaceutically active agent is applied;

[0335] b. Testing said sample for a signature indicative of a discrete renal cell carcinoma specific state by determining expression of at least 6, preferably of at least 10 genes of Table 10;

[0336] c. Allocating a discrete renal cell carcinoma specific state to said sample based on the signature determined in step b.);

[0337] d. Providing a sample of a human or animal individual being suspected to suffer from renal cell carcinoma after a pharmaceutically active agent is applied;

[0338] e. Testing said sample for a signature indicative of a discrete renal cell carcinoma specific state by determining expression of at least 6, preferably of at least 10 genes of Table 10;

[0339] f. Allocating a discrete renal cell carcinoma specific state to said sample based on the signature determined in step e.);

[0340] g. Comparing the discrete renal cell carcinoma specific states identified in steps c.) and f.).

[0341] In these methods, one signature is characterized by the expression pattern of at least 6, 7, 8, or 9, preferably of at least 10, 11, 12, 13, 14, 15, 16, 17, 18, 19 or 20 genes of Table 10 with genes 1 to 286 of Table 10 being overexpressed and genes 287 to 454 of Table 10 being underexpressed. This signature is indicative of discrete RCC specific state B. The signature is thus indicative of an RCC type with an intermediate average survival time where about 45 to about 55% such as about 50% of patients can be expected to live after 60 months. Preferably, the presence of this signature will be indicative of a discrete disease-specific state in RCC, which is indicative of an intermediate average survival time where about 40 to about 50% such as about 45% of patients can be expected to live after 90 months.

[0342] In these methods, one signature is characterized by the expression pattern of at least 6, 7, 8, or 9, preferably of at least 10, 11, 12, 13, 14, 15, 16, 17, 18, 19 or 20 genes of Table 10 with genes 1 to 286 of Table 10 being underexpressed and genes 287 to 454 of Table 10 being overexpressed. This signature is indicative of the discrete RCC specific states A or C. For an unambiguous differentiation, one may rely on signatures based on the expression profile of genes of Table 11.

[0343] Such signatures may be characterized by the expression pattern of at least 6, 7, 8 or 9, preferably of at least 10, 11, 12, 13, 14, 15, 16, 17, 18, 19 or 20 genes of Table 11 with genes 1 to 19 of Table 11 being overexpressed and genes 20 to 195 of Table 11 being underexpressed. This signature is indicative of discrete specific RCC state C. It thus indicates an RCC type with a low average survival time where e.g. about 30% to about 45% such as about 40% of patients can be expected to live after 60 months. Preferably, the presence of this signature will be indicative of a discrete disease-specific state in RCC, which is indicative of an intermediate average survival time where about 5 to about 30% such as about 10% to 20% of patients can be expected to live after 90 months.

[0344] Another signature may be characterized by the expression pattern of at least 6, 7, 8, or 9, preferably of at least 10, 11, 12, 13, 14, 15, 16, 17, 18, 19 or 20 genes of Table 11 with genes 1 to 19 of Table 11 being underexpressed and genes 20 to 195 of Table 11 being overexpressed. This signature is indicative of discrete specific RCC state A. It thus indicates an RCC type with a high average survival time where about 70 to about 90% such as about 80% of patients can be expected to live after 60 months. Preferably, the presence of this signature will be indicative of a discrete disease-specific state in RCC, which is indicative of an intermediate average survival time where about 60 to about 80% such as about 70% of patients can be expected to live after 90 months.

[0345] As mentioned above the set of genes in Tables 10 and 11 were identified by computer-implemented, algorithm-based approaches after it had been shown that three discrete disease specific states exist in the case of RCC. With this knowledge at hand, it was speculated that computer-implemented, algorithm-based approaches can be used to identify such patterns in existing expression data. Such an approach is described in the Example section under “3. Identification of RCC specific gene sets”.

[0346] The invention in some embodiments thus relates to:

[0347] 1. Discrete disease-specific state for use as a diagnostic and/or prognostic marker in classifying a sample from at least one patient, which is suspected of being afflicted by a disease, optionally by a hyper-proliferative disease.

[0348] 2. Discrete disease-specific state for use as a diagnostic and/or prognostic marker in classifying a least one cell line of a disease, optionally of a hyper-proliferative disease.

[0349] 3. Discrete disease-specific state for use as a target for development, identification and/or screening of at least one pharmaceutically active compound.

[0350] 4. Discrete disease-specific state according to any of 1 to 3, which can be described by way of a signature of at least one descriptor.

[0351] 5. Discrete disease-specific state according to 4, wherein said state can be described by way of a signature which comprises at least two descriptors which have been identified by comparing at least two regulatory networks in at least two patient derived-samples or cell lines.

[0352] 6. Signature for use as a diagnostic and/or prognostic marker in classifying at least sample from at least one patient which is suspected to be afflicted by a disease, optionally by a hyper-proliferative disease wherein the signature comprises a qualitative and/or quantitative pattern of at least one descriptor and wherein the signature is indicative of a discrete disease-specific state.

[0353] 7. Signature for use as a diagnostic and/or prognostic marker in classifying at least one cell line of at least one disease, optionally of a hyper-proliferative disease, wherein the signature comprises a qualitative and/or quantitative pattern of at least one descriptor and wherein the signature is indicative of a discrete disease-specific state.

[0354] 8. Signature for use as a read out of a target for development, identification and/or screening of at least one pharmaceutically active compound, wherein the signature comprises a qualitative and/or quantitative pattern of at least one descriptor and wherein the signature is indicative of a discrete disease-specific state.

[0355] 9. Signature according to any of 6 to 8, which can be identified by analyzing multiple descriptors from at least two different regulatory networks in at least two patient-derived samples or in at least two different cell lines.

[0356] 10. Signature according to 9, which can be identified by analyzing approximately 200 to 400 descriptors from approximately 76 regulatory pathways in approximately 100 patient derived samples or approximately 20 cell lines.

[0357] 11. Signature according to 9, which is identified by analyzing approximately 200 to 400 descriptors from approximately 165 regulatory pathways in approximately 100 patient derived samples or approximately 20 cell lines.

[0358] 12. Signature according to any of 6 to 11, wherein the localization, the processing, the modification, the kinetics and/or the expression pattern of descriptors serves as a signature.

[0359] 13. Signature according to any of 6 to 12, wherein genes or gene-associated molecules are used as descriptors and wherein the expression pattern thereof serves as a signature.

[0360] 14. Signature according to 13, wherein expression is tested on the RNA or protein level.

[0361] 15. Signature according to any of 6 to 14 for use as diagnostic and/or prognostic marker in the classification of at least one disease, optionally of at least one hyper-proliferative disease, preferably of renal cell carcinoma, or for use as read out of a target for development, identification and/or screening of at least one pharmaceutically active compound, wherein the signature is characterized by:
[0362] an overexpression of at least one gene of table 1, and/or
[0363] an underexpression of at least one gene of table 2.

[0364] 16. Signature according to 15, wherein the signature is characterized by:
[0365] a. an overexpression of at least one gene of table 1, and/or
[0366] b. an underexpression of at least one gene of table 2, and wherein determination of the over- and/or underexpression of at least one gene of table 1 and table 2 respectively allows assigning a discrete disease-specific state with a likelihood of more than 50%.

[0367] 17. Signature according to 16, wherein the signature is characterized by:
[0368] a. an overexpression of at least one gene of table 1, and/or
[0369] b. an underexpression of at least one gene of table 2, and wherein determination of the over- and/or underexpression of at least four genes of table 1 and table 2 respectively allows assigning a discrete disease-specific state with a likelihood of ≧95%.

[0370] 18. Signature according to any of 15 to 17, wherein the signature is indicative of a discrete disease-specific state at least in RCC, which is indicative of an intermediate average survival time where about 45 to about 55% of patients can be expected to live after 60 months.

[0371] 19. Signature according to any of 7 to 14 for use as diagnostic and/or prognostic marker in the classification of at least one disease, optionally of at least one hyper-proliferative disease, preferably of renal cell carcinoma, or for use as a read out of a target for development, identification and/or screening of at least one pharmaceutically active compound, wherein the signature is characterized by:
[0372] a. an overexpression of at least one gene of table 3, and/or
[0373] b. an underexpression of at least one gene of table 4.

[0374] 20. Signature according to 19, wherein the signature is characterized by:
[0375] a. an overexpression of at least one gene of table 3, and/or
[0376] b. an underexpression of at least one gene of table 4, and wherein determination of the over- and/or underexpression of at least one gene of table 3 and table 4 respectively allows assigning a discrete disease-specific state with a likelihood of ≧50%.

[0377] 21. Signature according to 20, wherein the signature is characterized by:
[0378] a. an overexpression of at least one gene of table 3, and/or
[0379] b. an underexpression of at least one gene of table 4, and wherein determination of the over- and/or underexpression of at least six genes of table 3 and table 4 respectively allows assigning a discrete disease-specific state with a likelihood of ≧95%.

[0380] 22. Signature according to any of 19 to 21, wherein the signature is indicative of a discrete disease-specific state at least in RCC, which is indicative of a low average survival time where about 35 to about 45% of patients can be expected to live after 60 months.

[0381] 23. Signature according to any of 7 to 14 for use as diagnostic and/or prognostic marker in the classification of at least one disease, optionally of at least one hyper-proliferative disease, preferably of renal cell carcinoma, or for use as a read out of a target for development, identification and/or screening of at least one pharmaceutically active compound, wherein the signature is characterized by:
[0382] a. an underexpression of at least one gene of table 3, and/or
[0383] b. an overexpression of at least one gene of table 4.

[0384] 24. Signature according to 23, wherein the signature is characterized by:
[0385] a. an underexpression of at least one gene of table 3, and/or
[0386] b. an overexpression of at least one gene of table 4, and wherein determination of the under- and/or overexpression of at least one gene of table 3 and table 4 respectively allows assigning a discrete disease-specific state with a likelihood of ≧50%.

[0387] 25. Signature according to 24, wherein the signature is characterized by:
[0388] a. an underexpression of at least one gene of table 3, and/or
[0389] b. an overexpression of at least one gene of table 4, and wherein determination of the under- and/or overexpression of at least six genes of table 3 and table 4 respectively allows assigning a discrete disease-specific state with a likelihood of ≧95%.

[0390] 26. Signature according to any of 23 to 25, wherein the signature is indicative of a discrete disease-specific state at least in RCC, which is indicative of a high average survival time where about 70 to about 90% can be expected to live after 60 months.

[0391] 27. Signature according to any of 7 to 26, wherein the signature is indicative of a discrete disease-specific state that is indicative of a functional clinical parameter such as survival time.

[0392] 28. Method of identifying a signature and optionally at least one discrete disease-specific state being implicated in at least one disease, optionally in at least one hyper-proliferative disease comprising at least the steps of:
[0393] a. Testing for quality and/or quantity of descriptors of genes or gene associated molecules in disease-specific samples derived from human or animal individuals suffering from said disease or in cell lines of said disease;
[0394] b. Clustering the results obtained in step a.) comprising at least the steps of:
   [0395] i. Sorting the results for each descriptor by its quality and/or quantity,
   [0396] ii. Sorting the disease-specific samples or cell lines for comparable quality and/or quantity of descriptors across all descriptors;
   [0397] iii. Identifying different patterns for common sets of descriptors;
   [0398] iv. Allocating to each pattern identified in step b.)iii.) a signature;
   [0399] v. Optionally allocating to each signature identified in step b.),iv.) a discrete disease-specific state.

[0400] 29. Method according to 28, comprising at least the steps of:
[0401] a. Testing for quality and/or quantity of descriptors of genes or gene associated molecules in disease-specific samples derived from human or animal individuals suffering from said disease or in cell lines of said disease;
[0402] b. Clustering the results obtained in step a.) comprising at least the steps of:
   [0403] i. Sorting the results for each descriptor by its quality and/or quantity,
   [0404] ii. Sorting the disease-specific samples or cell lines for comparable quality and/or quantity of descriptors across all descriptors;
   [0405] iii. Identifying different groups of descriptors which are differentially regulated across said disease-specific samples or cell lines;
[0406] c. Combining the descriptors which are identified in step b.)iii.) wherein the quality and/or quantity of said descriptors disease-specific samples or cell lines are already known from step a.);
[0407] d. Clustering the results obtained in step c.) comprising at least the steps of:
   [0408] i. Sorting the results for each descriptor of step c.) by its quality and/or quantity,
   [0409] ii. Sorting the disease-specific samples or cell lines for comparable quality and/or quantity of descriptors across all descriptors;
   [0410] iii. Identifying different patterns for the set of descriptors obtained in step c.);
   [0411] iv. Allocating to each pattern identified in step d.)iii.) a signature;
   [0412] v. Optionally allocating to each signature identified in step d.),iv.) a discrete disease-specific state.

[0413] 30. Method according to 28 or 29, comprising at least the steps of:
[0414] a. Testing for quality and/or quantity of descriptors of genes or gene associated molecules which are associated with at least two regulatory networks in disease-specific samples derived from human or animal individuals suffering from said disease or in cell lines of said disease;
[0415] b. Clustering the results obtained in step a.) comprising at least the steps of:
   [0416] i. Sorting the results for each descriptor within at least one regulatory network by its quality and/or quantity,
   [0417] ii. Sorting the disease-specific samples or cell lines for comparable quality and/or quantity of descriptors across all descriptors within one regulatory network;
   [0418] iii. Identifying different groups of descriptors which are differentially regulated across said disease-specific samples or cell lines within the at least one regulatory network;
[0419] c. Combining the descriptors which are identified in step b.)iii.) wherein the quality and/or quantity of said descriptors of disease-specific samples or cell lines are already known from step a.);
[0420] d. Clustering the results obtained in step c.) comprising at least the steps of:
   [0421] i. Sorting the results for each descriptor of step c.) by its quality and/or quantity,
   [0422] ii. Sorting the disease-specific samples or cell lines for comparable quality and/or quantity of descriptors across all descriptors;
   [0423] iii. Identifying different patterns for the set of descriptors obtained in step c.);
   [0424] iv. Allocating to each pattern identified in step d.)iii.) a signature;
   [0425] v. Optionally allocating to each signature identified in step d.),iv.) a discrete disease-specific state.

[0426] 31. Method according to 30, wherein approximately 200 to 400 descriptors from approximately 76 regulatory pathways in approximately 100 patient derived samples or approximately 20 cell lines are analyzed.

[0427] 32. Method according to 31, wherein approximately 200 to 400 descriptors from approximately 165 regulatory pathways in approximately 100 patient derived samples or approximately 20 cell lines are analyzed.

[0428] 33. Method according to any of 28 to 32, wherein the localization, the processing, the modification, the kinetics and/or the expression pattern of descriptors serves as a signature.

[0429] 34. Method according to any of 28 to 33, wherein genes or gene-associated molecules are used as descriptors and wherein the expression pattern thereof serves as a signature.

[0430] 35. Method according to 34, wherein expression is tested on the RNA or protein level.

[0431] 36. Method according to any of 30 to 35, wherein the regulatory networks are those identifiable by the Panther Software.

[0432] 37. Method according to any of 28 to 36, wherein the clustering process in steps b. or d. of claims 28 to 30 is a two-way hierarchical clustering with the TIGR MeV software.

[0433] 38. Method according to any of 28 to 37, wherein the identification of groups and signatures process in steps b. or d. of claims 28 to 30 is done with the SAM software.

[0434] 39. Method according to any of 28 to 38, wherein the disease-specific samples are renal cell carcinoma cell lines.

[0435] 40. Method according to any of 28 to 38, wherein the cell lines are primary or permanent renal cell carcinoma cell lines.

[0436] 41. Methods according to any of 28 to 40, wherein the discrete disease specific states and the signatures describing them can be linked to functional clinical parameters such as survival time.

[0437] 42. A set of descriptors obtainable by a method of any of 28 to 41.

[0438] 43. A signature obtainable by a method of any of 28 to 41.

[0439] 44. A discrete disease-specific state obtainable by a method of any of 28 to 41.

[0440] 45. Use of a set of descriptors of 42, a signature of 43 and/or a discrete disease-specific sample of 44 as a diagnostic or prognostic marker for at least one disease, optionally at least one hyper-proliferative disease or as a read out of a target or as a target for the development and/or application of at least one pharmaceutically active compound.

[0441] 46. A method of diagnosing, stratifying and/or screening a disease, optionally a hyper-proliferative disease in at least one patient, which is suspected of being afflicted by a disease, optionally by a hyper-proliferative disease or in at least one cell line of a disease, optionally of a hyper-proliferative disease comprising at least the steps of:
[0442] a. Providing a sample of a human or animal individual being suspected to suffer from said disease, optionally of said hyper-proliferative disease or at least one cell line of said disease, optionally of said hyper-proliferative disease;
[0443] b. Testing said sample for a signature, optionally a signature of 43;
[0444] c. Allocating a discrete disease-specific state to said sample or cell line based on the signature determined in step b.).

[0445] 47. A method of determining the responsiveness of at least one human or animal individual which is suspected of being afflicted by a disease, optionally by a hyper-proliferative disease towards a pharmaceutically active agent comprising at least the steps of:
[0446] a. Providing a sample of at least one human or animal individual which is suspected of being afflicted by a disease before the pharmaceutically active agent is administered;
[0447] b. Testing said sample for a signature, optionally a signature of 43;
[0448] c. Allocating a discrete disease-specific state to said sample based on the signature determined;
[0449] d. Determining the effect of a pharmaceutically active compound on the disease symptoms and/or discrete disease-specific state in said individual;
[0450] e. Identifying a correlation between the effects on disease symptoms and/or discrete disease-specific state and the discrete disease-specific state of the sample.

[0451] 48. A method of predicting the responsiveness of at least one patient which is suspected of being afflicted by a disease, optionally by a hyper-proliferative disease towards a pharmaceutically active agent comprising at least the steps of:
[0452] a. Determining whether a correlation between effects on disease symptoms as a consequence of administration of a pharmaceutically active agent and a discrete disease-specific state exists by using the method of 46;
[0453] b. Testing a sample of a human or animal individual which is suspected of being afflicted by a disease, optionally by a hyper-proliferative disease for a signature, optionally a signature of 43;
[0454] c. Allocating a discrete disease-specific state to said sample based on the signature determined;
[0455] d. Comparing the discrete disease-specific state of the sample in step c. vs. the discrete disease-specific state for which a correlation has been determined in step a.);
[0456] e. Predicting the effect of a pharmaceutically active compound on the disease symptoms in said patient.

[0457] 49. A method of determining the effects of a potential pharmaceutically active compound, comprising at least the steps of:
[0458] a. Providing a sample of at least one human or animal individual which is suspected of being afflicted by a disease, optionally by a hyper-proliferative disease or a cell line of a disease, optionally of a hyper-proliferative disease before a pharmaceutically active agent is applied;
[0459] b. Testing said sample or cell line for a signature, optionally a signature of 43;
[0460] c. Allocating a discrete disease-specific state to said sample or cell line based on the signature determined;
[0461] d. Providing a sample of at least one human or animal individual which is suspected of being afflicted by a disease, optionally by a hyper-proliferative disease or a cell line of a disease, optionally of a hyper-proliferative disease after a pharmaceutically active agent is applied;
[0462] e. Testing said sample or cell line for a signature, optionally a signature of 43;
[0463] f. Allocating a discrete disease-specific state to said sample or cell line based on the signature determined;
[0464] g. Comparing the discrete disease-specific state identified in steps c.) and f.).

[0465] 50. A method of any of 46 to 49, wherein said discrete disease-specific states are determined for samples of a patient being suspected of suffering from renal cell carcinoma or for renal cell carcinoma cell lines.

[0466] 51. A method of any of 46 to 50, wherein a discrete disease specific state of a disease, optionally of a hyper-proliferative disease, preferably of renal cell carcinoma is allocated by a signature, wherein the signature is characterized by:
[0467] a. an overexpression of at least one gene of table 1, and/or
[0468] b. an underexpression of at least one gene of table 2.

[0469] 52. Method of 51, wherein the signature is characterized by:
[0470] a. an overexpression of at least one gene of table 1, and/or
[0471] b. an underexpression of at least one gene of table 2, and wherein determination of the over- and/or underexpression of at least one gene of table 1 and table 2 respectively allows assigning a discrete disease-specific state with a likelihood of ≧50%.

[0472] 53. Method of 52, wherein the signature is characterized by:
[0473] a. an overexpression of at least one gene of table 1, and/or
[0474] b. an underexpression of at least one gene table 2, and wherein determination of the over- and/or underexpression of at least four genes of table 1 and table 2 respectively allows assigning a discrete disease-specific state with a likelihood of ≧90%.

[0475] 54. Method according to any of 51 to 53, wherein the signature is indicative of a discrete disease-specific state at least in RCC, which is indicative of an intermediate average survival time where about 45 to about 55% of patients can be expected to live after 60 months.

[0476] 55. A method of any of 46 to 50, wherein a discrete disease specific state of renal cell carcinoma is allocated by a signature, wherein the signature is characterized by:
[0477] a. an overexpression of at least one gene of table 3, and/or
[0478] b. an underexpression of at least one gene of table 4.

[0479] 56. A method of 55, wherein the signature is characterized by:
[0480] a. an overexpression of at least one gene of table 3, and/or
[0481] b. an underexpression of at least one gene of table 4, and wherein determination of the over- and/or underexpression of at least one gene of table 3 and table 4 respectively allows assigning a discrete disease-specific state with a likelihood of ≧50%.

[0482] 57. A method of 56, wherein the signature is characterized by:
[0483] a. an overexpression of at least one gene of table 3, and/or
[0484] b. an underexpression of at least one gene of table 4, and wherein determination of the over- and/or underexpression of at least six genes of table 3 and table 4 respectively allows assigning a discrete disease-specific state with a likelihood of ≧95%.

[0485] 58. Method according to any of 55 to 57, wherein the signature is indicative of a discrete disease-specific state at least in RCC, which is indicative of a low average survival time where about 35 to 45% of patients can be expected to live after 60 months.

[0486] 59. A method of any of 46 to 50, wherein a discrete disease specific state of renal cell carcinoma is allocated by a signature, wherein the signature is characterized by:
[0487] a. an underexpression of at least one gene of table 3, and/or
[0488] b. an overexpression of at least one gene of table 4.

[0489] 60. A method of 59, wherein the signature is characterized by:
[0490] a. an underexpression of at least one gene of table 3, and/or
[0491] b. an overexpression of at least one gene of table 4, and wherein determination of the under- and/or overexpression of at least one gene of table 3 and table 4 respectively allows assigning a discrete disease-specific state with a likelihood of ≧50%.

[0492] 61. A method of 60, wherein the signature is characterized by:
[0493] a. an underexpression of at least one gene of table 3, and/or
[0494] b. an overexpression of at least one gene of table 4, and wherein determination of the under- and/or overexpression of at least six genes of table 3 and table 4 respectively allows assigning a discrete disease-specific state with a likelihood of ≧95%.

[0495] 62. Method according to any of 60 to 62, wherein the signature is indicative of a discrete disease-specific state at least in RCC, which is indicative of a high average survival time where about 70 to about 90% of patients can be expected to live after 60 months.

[0496] 63. A method according to any of 46 to 62, wherein the signature is indicative of a discrete disease-specific state that is indicative of a functional clinical parameter such as survival time.

[0497] The invention is now described with respect to specific experiments. These experiment shall, however, not be construed as being limiting.

### Experiments

### 1. Materials and Methods

### Tissue Specimens, Cell Lines, Nucleic Acid Extraction

[0498] Frozen primary renal cell carcinoma (RCC) and tissue from RCC metastases were obtained from the tissue biobank of the University Hospital Zurich. This study was approved by the local commission of ethics (ref number StV 38-2005). All tumors were reviewed by a pathologist specialized in uropathology, graded according to a 3-tiered grading system (14) and histologically classified according to the World Health Organisation classification (15). All tumor tissues were selected according to the histologically verified presence of at least 80% tumor cells. DNA was extracted from 56 ccRCC, 13 pRCC and 69 matched normal renal tissues using the Blood and Tissue Kit (Qiagen). RNA was extracted from 74 ccRCC, 22 pRCC, 2 chromophobe RCC, 15 metastases of ccRCC using the RNeasy minikit (Qiagen). DNA and RNA from 46 ccRCC and 10 pRCC were used for both SNP array and microarray experiments. Expression analysis was additionally performed with RNA from 24 RCC cell lines, 6 cell lines from RCC metastasis and 4 prostate cancer cell lines as controls. All tumours and cell lines used in SNP- and expression array experiments are listed in table 6.

### SNP Array Analysis and Classification

[0499] SNP array analysis was performed with Genome Wide Human SNP 6.0 arrays according to manufacturer's instructions (Affymetrix). Arrays were scanned using the GeneChip Scanner 3000 7G.

[0500] Raw probe data CEL files were processed with the R statistical software framework (http://www.cran.org), using the array analysis packages from the aroma.affymetrix project (16) (http://groups.google.com/group/aroma-affymetrix/). Total copy number estimates were generated using the CRMAv2 method (17) including allelic cross talk calibration, normalization for probe sequence effects and normalization for PCR fragment-length effects. Copy number segmentation was performed using the Circular Binary Segmentation method (18), implemented in the DNA copy package available through the Bioconductor project (http://www.bioconductor.org). Normalized data plots including segmentation results, oncogene map positions and known copy number variations as reported in the Database of Genomic Variants (DGV, http://projects.tcag.ca/variation/; (19)) were generated with software packages developed for the Progenetix project(2) (http://www.progenetix.net). Map positions were referenced with respect to the UCSC genome assembly hg18, based on the March 2006 human reference sequence (NCBI Build 36.1). Data from arrays with prominent probe level noise after normalization were excluded before proceeding with the evaluation of copy number imbalances. Overall, 114 SNP 6.0 arrays (45 tumors, 69 normal tissue samples) were used for final data processing.

[0501] Since oncogenomic imbalances frequently cover huge genomic regions with hundreds of possible target genes, a dynamic thresholding approach was used on the copy number segmentation data. For the determination of focussed genomic imbalances containing oncogenetic targets, size-limited regions with high deviation from the copy number baseline were evaluated for their gene content. Primary candidate genes were selected from copy number imbalanced regions if no corresponding full-overlap CNV had been reported in DGV. For the generation of overall genomic imbalance profiles, probabilistic thresholds of 0.13/−0.13 were used for genomic gains and losses, respectively. Recurrently appearing candidates were listed and considered only once for further analysis. Functional gene classifications were performed with Ingenuity (http://www.ingenuity.com), KEGG (Kyoto Encyclopedia of Genes and Genomes—http://www.genome.jp/kegg/) and PANTHER (Protein Analysis Through Evolutionary Relationships) Classification System (20, 21) (http://www.pantherdb.org). Generation and analysis of gene/protein lists were performed with PANTHER by considering both, PubMed & Celera, datasets.

### Microarrays and Expression Analysis

[0502] RNA was hybridized according to the manufacturer's instructions (Affymetrix, Santa Clara, Calif.). Arrays were scanned using the HT Scanner. Affymetrix GeneChip data was normalized using MASS from Bioconductor (22) and log₂-scaled. Hierarchical clustering was done with TIGR MeV(23) using Euclidian distance and average linkage. The identification of tumor type specific biomarkers was performed using SAM (12). The most significant genes were cross-checked in GENEVESTIGATOR (10, 11) to remove probe sets that had absent calls across all samples.

[0503] Probesets could be identified for at least half of the genes from the four pathways extracted from PANTHER (195 probe sets for angiogenesis, 271 for inflammation, 196 for integrin, and 263 for Wnt). For each pathway, a two-way hierarchical clustering of probe sets versus the complete set of expression arrays (147 arrays) was applied. We selected up to four clusters that best represented the overall array clustering in each pathway (FIG. 2, table 8). Finally, a joint clustering of all probe sets from these clusters resulted in the groupings described (FIG. 3, table 5).

[0504] Microarray and SNP data have been deposited in GEO under GSE19949 (tentative release: 30.06.2010). Reviewer link: http://www.ncbi.nlm.nih.gov/geo/query/acc.cgi?token=zronrguasyacefq&acc=GS E19949

[0505] Raw microarray expression data were generated by using the HG-U133A Affymetrix chip for each sample respectively. For further analysis, these raw data were uploaded into the online, high quality and manually curated expression database and meta-analysis system GENEVESTIGATOR (www.genevestigator.com). As mentioned, a two way hierarchical clusterings were than performed. Genexpressions versus the entire set of samples were clustered. The gene list used for this first clustering was provided by the PANTHER classification system (www.pantherdb.org) and encompassed the entirety of genes belonging to one pathway (see FIG. 2 and FIG. 3). The result of such a clustering is, that tumors with same expression profiles, seen over all probesets entered, reside in close vicinity. Dependent on the presence of recurrent differentially regulated genes in different tumor samples, distinct clustered form throughout the entire tumor cohort. In a second step, probesets representing these formed clusters, were picked and combined into another clustering matrix. The same two way hierarchical clustering conditions was thereafter performed against the same sample cohort. Upon this analysis, tumor groups appeared (FIG. 3).

[0506] In a further step the question was raised whether the best gene candidates were already picked in FIG. 3 to enable a clear differentiation between distinct groups. To answer this question out of FIG. 3, 40 tumor samples (Affymetrix HG-U133A, raw data) from different groups were arbitrarily picked for best identifier detection. By using GENVESTIGATOR in combination with the statistical program SAM (Significance Analysis of Microarrays) the best identifiers for the respective group, were calculated (FIG. 4). Thus these 40 arbitrarily chosen samples were statistically analyzed with respect to expression of all 22.000 probesets present on the Affymetrix HG-U133A microarray. The data generated in FIG. 3 and FIG. 4 are absolute expression values.

[0507] We used this resulting signature (FIG. 4) as a “marker-signature” for the following meta analysis. For this purpose the expression characteristics of these genes across different tumor studies available from all HG_U133A microarrays in the GENEVESTIGATOR database was confirmed. The values shown here are relative values (right picture of FIGS. 4A and 4B). Here for every Affymetrix tumor chip, a corresponding control was present. The signature appeared in the tumor samples but not in the control. Further, the values shown are mean values. Several expression array chips from one experimental procedure representing a distinct tumortype were overlaid.

### TMA Construction and Immunohistochemistry

[0508] We used two tissue micro arrays (TMAs) with tumor tissue from 27 and 254 RCC-related nephrectomy specimen respectively. The samples were retrieved from the archives of the Institute for Surgical Pathology; University Hospital Zurich (Zurich, Switzerland) between the years 1993 to 2007. TMAs were constructed as previously described (24). To sufficiently address tumor heterogeneity, we used 3 punches per tumor for the construction of the TMA with 27 tumor samples (25). One biopsy cylinder per tumour was regarded as sufficient for constructing the TMA with 254 tumors. TMA sections (2.5 μm) on glass slides were subjected to immunohistochemical analysis according to the Ventana (Tucson, Ariz., USA) automat protocols. CD34 (Serotec Ltd.—clone QBEND-10, dilution 1:800), MSH6 (BD Biosciences—clone 44, dilution 1:500) and DEK (BD Biosciences—clone 2, dilution 1:400) stainings were performed and analysed under a Leitz Aristoplan microscope (Leica, Wetzlar, Germany). Tumors were considered MSH6 or DEK positive if more than 1% of tumour cells showed unequivocal nuclear expression. MVD was determined as previously described (26). Statistics were performed with Statview 5.0 (SAS, USA) and SPSS 17.0 for Windows (SPSS Inc., Chicago; IL).

### 2. Results

[0509] First, the genomic profiles of 45 RCCs and matched normal tissues were analyzed using Affymetrix SNP arrays. For illustration, we extracted an overall summary of genomic imbalances using the progenetix website (http://www.progenetix.net) and compared them to the entire available dataset of 472 RCCs (FIG. 1A). Consistent with previous CGH data (8), our results confirmed the overall composite of CGH profiles in RCC.

[0510] We next focused on tumor-specific genomic changes below 5 Mb, which is the resolution limit for chromosomal losses and gains obtained by CGH (9). We identified 126 different regions in our cohort varying between 0.5 kb to 5 Mb and encompassing 61 allelic gains and 65 allelic losses. Irrespective of the type of allelic imbalance and gene function, we assigned the same relevance to each identified region and gene by considering it as “affected”. In total, coding regions of 769 genes were partially or entirely involved and only 5 genes (AUTS2, ETS1, FGD4, PRKCH, FTO) were found recurrently affected in only up to 5 tumors.

[0511] In contrast to large chromosomal aberrations commonly detected by CGH in public data, the genomic alterations <5 Mb could not be linked to morphologically defined RCC subtypes. Additional expression analysis of the 769 genes against the GENEVESTIGATOR (10, 11) (http://www.genevestigator.com) human microarray dataset showed no apparent clustering (data not shown). We next ran the entire gene list against classification systems such as Ingenuity, KEGG and PANTHER. The PANTHER software integrated them into superior biological processes. This database mapped 557 of 769 IDs (73%). PANTHER BAR CHART allocated the 557 genes to 76 of a total of 165 available signaling- and metabolic “networks” (FIG. 1B, Table 7). Analyzing the genes for each of these four processes revealed the diversity and plasticity with genes commonly involved in different “pathways”, culminating in superior biological processes. As an example the “Actin related protein ⅔ complex”, initially affiliated to “Inflammation” (PANTHER pathway ID P00031), contains the gene ARPC5L which is also implicated in Integrin signalling (PANTHER pathway ID P00034), Huntington disease (PANTHER pathway ID P00029) or the Cytoskeletal regulation by Rho GTPases (PANTHER pathway ID P00016).

[0512] We then generated gene lists of each of the 76 processes as assigned by PANTHER and investigated each of these gene lists on the RNA expression level by hierarchical clustering in 98 primary RCCs (including the samples used for the SNP array experiment), 15 RCC metastases as well as in 34 cell lines, using Affymetrix HG-U133A arrays (Table 6). For example, the four dominating biological processes (FIG. 1B) “Inflammation”, “Angiogenesis”, “Integrin” and “Wnt” consisted of 476, 354, 365 and 497 genes, respectively. Within the clustering of these four dominating processes we observed different, clearly distinguishable major group patterns (FIG. 2A-D, table 5), suggesting several tumor group-specific gene regulatory mechanisms. In contrast, no clear differential gene expression patterns were obtained through hierarchical clustering of the genes of the remaining 72 biological processes (including those for apoptosis, HIF or p53 signaling).

[0513] We then selected up to four gene clusters from each of the four matrices with a total of 92 genes that were most representative for the overall clustering of the samples (FIG. 2A-D, red boxes, Table 8) and combined them into a new matrix. Subsequent clustering of this matrix yielded four clearly distinct tumor groups (termed “A”, “B”, “C” and “cell lines”) (FIG. 3, table 5). Although being members of four “pathways” as proposed by PANTHER, the 92 genes represented only a small percentage of genes involved in these biological processes. We therefore preferred to subdivide the tumor groups into “A”, “B” “C” and “cell lines” rather than considering them as pathway-specific. Notably, even though only one (ITGAL) out of the 92 selected cluster-related genes was directly affected by a CNA in only one tumor of our RCC set, they collectively constitute group-specific expression signatures which ultimately appear to have originated from the genomic alterations detected by our SNP array analysis.

[0514] In contrast to the cell lines which represent a separate group, RCC metastases and primary RCCs split into group A, B or C irrespective of the tumor subtype, stage or differentiation grade. Although clear cell RCC (ccRCC), papillary RCC (pRCC) and chromophobe RCC have a different morphological phenotype, the combined appearance of the three subtypes across different clusters suggests molecular similarities.

[0515] We then profiled gene expression across 40 primary RCC samples that were arbitrarily chosen from the three tumor groups previously identified in FIG. 3. Hierarchical clustering of these samples across all 22,000 probe sets of this array showed that type B was clearly distinct from A and C (FIG. 4C left) and group A appeared as a tight cluster within the C clad. Using SAM (12), at least a 2-fold change in the expression level was seen for more than 2,000 genes, with 1,455 genes higher and 715 genes lower expressed in B compared to A and C, and 221 genes positively and 11 genes negatively regulated in A versus C. These independent findings confirmed the previous grouping of RCCs based on the genes derived from the SNP array results.

[0516] The most differentially regulated genes between group B and groups A and C were represented by 48 genes, with 16 being low expressed in B but strongly expressed in A and C (8.7−5.7 fold change) and 32 transcripts being abundant in B but decreased in A and C (14.4−5.2 fold change) (FIG. 4A left, Tables 1 and 2). Twenty-three genes clearly distinguished groups A and C with 4 genes being highly expressed in C but not in A (14.3−2.5 fold change), while 19 were highly expressed in A but not in C (16.0−4.2 fold change) (FIG. 4B left, Tables 3 and 4).

[0517] We then compared the expression characteristics of these genes across 80 different tumor studies (comparison sets of “tumor” versus “healthy”) available from all HG_U133A microarrays in the GENEVESTIGATOR database. For those genes differentially expressed between RCC tumors B versus RCC tumors

[0518] A and C, four independent kidney cancer experiments and 24 further tumor sets exhibited a very similar bimodal expression signature. Sixteen of these sets had a similar signature as RCC types A and C; eight sets were similar to type B. Similarly, for those genes that were most significantly deregulated between RCC tumors type A versus type C, 16 tumor sets showed similar characteristics in GENEVESTIGATOR. Not only kidney cancer but also thyroid cancer were similar to RCC type A, while 12 other sets, including breast-, bladder- and cervical carcinoma, were highly correlated to type C. For the remaining 39 tumor sets present in the database, none had group A, B or C specific gene signatures. These results validated our approach as they demonstrate high reproducibility of three different general molecular signatures in carcinogenesis, not only in RCC but also in other tumor types, arguing for conforming molecular strategies exploited by a number of different human cancers.

[0519] We then randomly selected 27 RCCs from the three respective groups (FIG. 3) and placed them into a small tissue microarray (TMA). A Hematoxylin/Eosin stained TMA section was blindly evaluated by a pathologist. All nine tumors of group A were characterized by high microvessel density (MVD), whereas there were no specific morphologic features in the tumors of groups B and C. To further verify this finding, we immunohistochemically stained the endothelial cell marker CD34 in the 27 RCCs.

[0520] As shown in Table 9 and FIG. 5, the results largely confirmed group-specific angiogenic traits. All nine tumors in group A, but only three in group B and one in group C had more than 100 microvessels, whereas the remaining ones had less than 50 microvessels per arrayed spot (0.036 mm²). Tumors with high and low MVD were classified accordingly. No further specific morphological features were seen in the tumors assigned to group B and C.

[0521] We then searched with SAM for genes with a clear present or absent expression profile in the three groups. By examining staining patterns of several protein candidates coded by these genes, we were finally able to assign tumors with high MVD as well as DEK and MSH6 positivity to group A, MSH6 negative tumors to group B, and tumors with low MVD but DEK and MSH6 positivity to group C.

[0522] To evaluate the obtained group-specific protein expression patterns in a much higher number of tumors, we screened a TMA with 254 RCCs. By strictly applying the staining combinations obtained form the small test TMA, 189 tumors (75%) were clearly assigned to a specific group. There were organ-confined and metastasizing RCCs of different tumor subtype and nuclear differentiation grade but varying frequencies in these groups (FIG. 6).

[0523] To determine the clinical aggressiveness of these groups, we focused our analysis on 176 of 189 RCC samples on the TMA for which survival data were available. Kaplan-Meier analysis showed a highly significant correlation (log rank test: p<0.0001) of group affiliation with overall survival, in which patient outcome was best in group A and worst in group C (FIG. 4D). This result was independent from tumor stage and Thoenes grade in a multivariate analysis (FIG. 6). By performing this survival analysis, we demonstrate that the molecular re-classification of RCC allows the identification of early stage tumors (pT1 and pT2) with high metastasizing potential associated with poor patient prognosis. In addition, the finding of late stage non-metastasizing RCCs in group A also suggests the existence of patients with a relative good prognosis although their tumors were categorized as pT3.

[0524] The data presented in this report suggests that the discovered group forming clusters represent gene signatures reflecting three common modalities of cancerogenesis. These gene clusters could be determined only by applying the entire set of the 126 tumor-specific CNAs detected in our RCC cohort. It is therefore remarkable that, although the frequencies of CNAs were largely differing in a single tumor and varied between none and 18 altered genomic regions, each of the group-specific gene expression patterns remained stable. Consequently, each of these RCC must have developed individually balanced mechanisms different to CNAs (i.e. mutations, methylations, transcriptional and translational modifications), which together support the regulation of molecular components to reach one of the three tumor groups (FIG. 7).

[0525] Our meta-analysis suggests similar strategies pursued by a number of different human cancer types. It is therefore tempting to speculate that either the entirety of different types of molecular alterations (i.e. mutations, CNAs and methylation) existing in a single tumor or the entirety of a specific type of molecular alteration (i.e. CNAs only) in a tumor type cohort would always lead to group-specific outputs, visualizable by gene expression profiling.

[0526] The data indicate that each tumor has programmed its own molecular road map by trial and error to finally reach one of the three different “destinations”. As our meta-analysis demonstrated the existence of these groups or discrete states in different but not in all human cancer types, additional yet unknown groups may exist.

### 3. Identification of RCC Specific Gene Sets

### Expression Data Generation

[0527] The data used for the computer-implemented, algorithm-based analysis was created using micro array chips such as those made by Affimetrix. The mRNA in the sample is amplified using PCR. On the micro array chip each gene is represented by multiple (usually 10 to 20) sequences of 25 nucleotides taken from the gene. Usually each sequence is found a second time on the chip in a modified version. This modified version is called mismatch (the correct version is called perfect match). It is used to estimate the unspecific binding of mRNA to the particular sequence. This pair of sequences is called probe pair. All probe pairs for one gene are called probe set. The sequences and their layout across the chip are defined and documented by the vendor of the micro array chip. After each measurement of a sample one has up to 50 values per gene which need to be combined into one expression level for the gene in the sample.

### Normalization

[0528] In order to determine the expression level different approaches can be used. One prominent example is the model-based-normalization (27). In model-based-normalization for each probe pair the difference between perfect match (PM) and mismatch (MM) is calculated. One then considers the results for one probe set (in other words: for one gene) but from multiple samples or measurements.

[0529] It is assumed that the sensitivity sₚ of each probe pair p is different but specific to this probe pair. On the other hand expression eₛ level for each gene in one sample s should be constant across all probe pairs. Hence one assumes

PM_{s,p}−MM_{s,p}=sₚeₛ+n_{p,s} (1)

where n_{p,s} is some additional noise. sₚ and eₛ are now optimised such that the sum of n_{p,s} is minimal and the sum of sₚ² is equal to the number of probe pairs

[0530] An additional way of normalizing data relies on using kernel regression. The rationale for using kernel regression normalization is that probe pair signal and/or expression levels may still exhibit different scaling and offsets across different measurements. For example, the duration and effectiveness of the PCR may modify these signals in this way. Furthermore signals amplification may differ in a non linear way between measurements. In order to compare measurements these modifications have to be compensated. One option for this compensation are kernel regression methods (32), e.g. Lowess.

[0531] In order to determine the regression one has to define a set of genes and a reference sample. The reference sample is taken to be the most average sample with the least number of outliers. The gene set may include all genes, but also a subset of genes can be used, e.g. the predefined set of housekeeping genes as supplied by the micro array vendor) or a set of genes determined by the invariant set method (28). However, a systematic amplification of a group of genes due to a cancer status might lead to a similar non-linear relationship between samples. Therefore kernel regression methods shall be used with caution in this context. The software dChip (29) implements most of the aforementioned normalization methods.

### Scaling

[0532] The normalization is usually done on a set of samples. Hence these sample become comparable in scale and offset. However, samples measured and normalized at different places will still differ in this respect. Therefore a scaling of the data is required that is robust against
[0533] Errors in extreme data points,
[0534] Offsets and
[0535] Linear scalings.

[0536] Furthermore the scaling shall not depend at this point on any data from other samples. One possibility to achieve this is to use the following formula:

e_{scaled}=(f(e)−m)/σ (2)

with
[0537] Some function f, which may transform the expression level in order to reduce the influence of extreme value. For example it might be the identity or the logarithm. If a function like the logarithm is used one may need to add a small constant ε before evaluating the logarithm in order to avoid non finite values. Then the size of ε should be of the order of the smallest measured expression levels.
[0538] Some average m taken over all expression levels (after transformation by f) within one sample. Examples for this average are the arithmetic average or the median.
[0539] Some quantity σ representing the scale of the data. An example here is the standard deviation taken over all expression levels (after transformation by f) within one sample. One may also reduce the range taken into account to the 2 central quartiles.

[0540] Another possibility is to scale the expression levels linearly with respect to a set of house keeping genes. These genes shall be selected similarly as for the kernel regression.

### Cluster Search

[0541] The states are considered common properties separating one group of tumors from the other both in gene expression levels and medical parameters. These groups of tumors can be established by applying different kinds of methods (33) of unsupervised learning (like neural gases (31) and cluster search, e.g. k-nearest neighbour search (35) to the gene expression profiles of the tumors of a learning set. The selection of distance-measure (a metric) used by the algorithms is also important. One may choose simple euclidean norm but also correlations. The type of scaling used also influences the metric and hence the results of the cluster search.

[0542] Therefore it is advisable to use different algorithms, metrics and scalings to get a comprehensive picture from which the states can be derived.

[0543] These states may also form a kind of hierarchy, where two sets of states are clearly separated, but themselves split into sub-states.

[0544] In the case of RCC cancer 3 states were found, labeled A, B, C. The states A and C are sub states of a more general state which may be designated as AC.

### Gene Search

[0545] Once the states are determined one has to find the genes which differentiate one state from the others in a given set of samples. The genes shall be selected in a way that they are as robust as possible against systematic errors of all kinds. This includes a good choice of scaling function as well as good choice of selection criteria. Possible selection criteria are
[0546] The Significance Analysis of Microarray-Index (30).
[0547] The correlation of the expression levels of all samples in a learning set against a function being 0 for all samples except those being in the state of interest. In latter case this function will be 1.
[0548] The correctness of the prediction based on the gene using an optimised single gene model (e.g. see next section).

[0549] In order to enhance the quality of gene selection these criteria can be tested on different scalings, e.g. (2) and (4) or different normalizations, e.g. dChip-data and just model-based-normalized data and any combination of these.

[0550] The gene search shall only include such genes that fulfill minimum values for all selected criteria, e.g. the absolute of the correlation greater than 0.7 or the correctness greater than 0.85.

### Model

[0551] Each sub-model consists of a list of genes g with corresponding thresholds θ_{g} and sides ((1) and (−1)) and two sets of status (set “in” and set “out”). In the first turn each gene is evaluated individually. This list of genes is determined using the gene search mentioned above and genes threshold is determined such that the correctness is optimal. Genes with positive correlation are considered “overexpressed”, the other genes are considered “underexpressed”.

[0552] If side is “overexpressed” the following test is done:

if e_{g}>θ_{g}+α increase Nᵢₙ by 1 (3a)

if e_{g}<θ_{g}−α increase Nₒᵤₜ by 1 (3b)

[0553] If side is “underexpressed” the following test is done:

if e_{g}<θ_{g}−α increase Nᵢₙ by 1 (3c)

if e_{g}>θ_{g}+α increase Nₒᵤₜ by 1 (3d)

[0554] The factor α>=0 defines a range of uncertainty around the genes threshold θ_{g}. A reasonable choice for α is ⅓ if a scale-free scaling (like (2)) was used. Otherwise the scale has to be included into α.

[0555] These tests are done for all genes in a sub-model. In the end one has two counts Nᵢₙ and Nₒᵤₜ. Now these two counts are compared:
[0556] If Nᵢₙ>βNₐₗₗ and Nᵢₙ>γNₒᵤₜ then the tumor is considered to be in one of the “in” states
[0557] Nₒᵤₜ>βNₐₗₗ and Nₒᵤₜ>γNᵢₙ then the tumor is considered to be in one of the “out” states

[0558] The factor β defines a minimum fraction of genes which must have taken a decision in (3). The factor γ defines by how much the state set considered must beat the other set of states. Reasonable choices are β=⅓ and γ=2.

### Reduced Models

[0559] For some applications the gene lists created by the gene search (see section Gene Search) are too exhaustive. In this case one may use just the best genes as selected by one or more of the criteria mentioned in section Gene Search. But this might not be the best selection for a given number of genes to be used. Although, all genes are tested individually and give a high number of correct predicted states, they may misclassify the same sample unless the genes are selected carefully from the larger list. The smaller the size of the requested subset the more careful the selection has to be done. Therefore an algorithm for sub-selecting genes is required.

[0560] This can be done with any optimisation algorithm, such as genetic algorithms or simple random-walk-optimisation on a set of optimisation criteria. Such criteria may include:
[0561] Correctness of prediction on the learning set of samples. The result of the full gene list is assumed to be the correct state for the sample. Thus the reduced model is consistent with the full model.
[0562] Correctness of the tendencies of prediction on the learning set of samples. If one remove the ranges of uncertainty totally (α=0, β=0, γ=1) or in part (e.g. β=0, γ=1) from the model defined above, one still gets a state but with less reliability. One can call these states tendency of the prediction and use it here if the unchanged model does not predict the state. Again the prediction and tendencies using the full gene list are assumed to represent the correct state for the sample. Thus the reduced model is consistent with the full model both in prediction and tendency.
[0563] Errors in prediction and tendencies of test set samples. Thess test set samples have not been included in the original learning set. Such data might be obtained from the Gene Expression Omnibus (34)

[0564] Additional constraints (e.g. at least 25% of overexpressed gene) can be applied to the selection algorithm

TABLE 1

| | | | SEQ ID No. | SEQ ID No. |
|---|---|---|---|---|
| No. | Probeset ID* | Gene Symbol | (mRNA) | (amino acid |
| 1 | 216527_at | — | — | — |
| 2 | 214715_x_at | ZNF160 | 1 | 2 |
| 3 | 222368_at | — | — | — |
| 4 | 214911_s_at | BRD2 | 3 | 4 |
| 5 | 214870_x_at | LOC100288442 | 5 | 6 |
| 6 | 215978_x_at | LOC152719 | 7 | 8 |
| 7 | 221501_x_at | LOC339047 | 9 | 10 |
| 8 | 212177_at | SFRS18 | 11 | 12 |
| 9 | 216563_at | ANKRD12 | 13 | 14 |
| 10 | 213311_s_at | TCF25 | 15 | 16 |
| 11 | 216187_x_at | — | — | — |
| 12 | 208246_x_at | — | — | — |
| 13 | 214235_at | CYP3A5 | 17 | 18 |
| 14 | 220796_x_at | SLC35E1 | 19 | 20 |
| 15 | 206792_x_at | PDE4C | 21 | 22 |
| 16 | 214035_x_at | LOC399491 | 23 | 24 |
| 17 | 215545_at | — | — | — |
| 18 | 212487_at | GPATCH8 | 25 | 26 |
| 19 | 221191_at | STAG3L1 | 27 | 28 |
| 20 | 213813_x_at | — | — | — |
| 21 | 220905_at | — | — | — |
| 22 | 214052_x_at | BAT2D1 | 29 | 30 |
| 23 | 212520_s_at | SMARCA4 | 31 | 32 |
| 24 | 221419_s_at | — | — | — |
| 25 | 211948_x_at | BAT2D1 | 33 | 34 |
| 26 | 221860_at | HNRNPL | 35 | 36 |
| 27 | 211600_at | PTPRO | 37 | 38 |
| 28 | 214055_x_at | BAT2D1 | 39 | 40 |
| 29 | 220940_at | ANKRD36B | 41 | 42 |
| 30 | 212027_at | RBM25 | 43 | 44 |
| 31 | 213917_at | PAX8 | 45 | 46 |
| 32 | 208610_s_at | SRRM2 | 47 | 48 |
| 33 | 202379_s_at | NKTR | 49 | 50 |
| 34 | 211996_s_at | LOC100132247 | 51 | 52 |

*The Probeset ID refers to the identification no. of the Affymetrix HG-U133A Chip.

TABLE 2

| | | | SEQ ID No. | SEQ ID No. |
|---|---|---|---|---|
| No. | Probeset ID* | Gene Symbol | (mRNA) | (amino acid |
| 1 | 201554_x_at | GYG1 | 53 | 54 |
| 2 | 221449_s_at | ITFG1 | 55 | 56 |
| 3 | 201337_s_at | VAMP3 | 57 | 58 |
| 4 | 203207_s_at | MTFR1 | 59 | 60 |
| 5 | 214359_s_at | HSP90AB1 | 61 | 62 |
| 6 | 208029_s_at | LAPTM4B | 63 | 64 |
| 7 | 209739_s_at | PNPLA4 | 65 | 66 |
| 8 | 202226_s_at | CRK | 67 | 68 |
| 9 | 207124_s_at | GNB5 | 69 | 70 |
| 10 | 211450_s_at | MSH6 | 71 | 72 |
| 11 | 218163_at | MCTS1 | 73 | 74 |
| 12 | 218462_at | BXDC5 | 75 | 76 |
| 13 | 211563_s_at | C19orf2 | 77 | 78 |
| 14 | 215236_s_at | PICALM | 79 | 80 |
| 15 | 200973_s_at | TSPAN3 | 81 | 82 |
| 16 | 219819_s_at | MRPS28 | 83 | 84 |

*The Probeset ID refers to the identification no. of the Affymetrix HG-U133A Chip.

TABLE 3

| | | | SEQ ID No. | SEQ ID No. |
|---|---|---|---|---|
| No. | Probeset ID* | Gene Symbol | (mRNA) | (amino acid |
| 1 | 221872_at | RARRES1 | 85 | 86 |
| 2 | 211519_s_at | KIF2C | 87 | 88 |
| 3 | 219429_at | FA2H | 89 | 90 |
| 4 | 204259_at | MMP7 | 91 | 92 |

*The Probeset ID refers to the identification no. of the Affymetrix HG-U133A Chip.

TABLE 4

| | | | SEQ ID No. | SEQ ID No. |
|---|---|---|---|---|
| No. | Probeset ID* | Gene Symbol | (mRNA) | (amino acid |
| 1 | 206836_at | SLC6A3 | 93 | 94 |
| 2 | 208711_s_at | CCND1 | 95 | 96 |
| 3 | 221031_s_at | APOLD1 | 97 | 98 |
| 4 | 205903_s_at | KCNN3 | 99 | 100 |
| 5 | 205247_at | NOTCH4 | 101 | 102 |
| 6 | 219371_s_at | KLF2 | 103 | 104 |
| 7 | 204677_at | CDH5 | 105 | 106 |
| 8 | 205902_at | KCNN3 | 107 | 108 |
| 9 | 212558_at | SPRY1 | 109 | 110 |
| 10 | 221529_s_at | PLVAP | 111 | 112 |
| 11 | 212538_at | DOCK9 | 113 | 114 |
| 12 | 218995_s_at | EDN1 | 115 | 116 |
| 13 | 218353_at | RGS5 | 117 | 118 |
| 14 | 204468_s_at | TIE1 | 119 | 120 |
| 15 | 219091_s_at | MMRN2 | 121 | 122 |
| 16 | 205507_at | ARHGEF15 | 123 | 124 |
| 17 | 209070_s_at | RGS5 | 125 | 126 |
| 18 | 221489_s_at | SPRY4 | 127 | 128 |
| 19 | 203934_at | KDR | 129 | 130 |

*The Probeset ID refers to the identification no. of the Affymetrix HG-U133A Chip.

TABLE 5

| | | Gene |
|---|---|---|
| No. | Probeset ID* | Symbol |
| 1 | 202677_at | RASA1 |
| 2 | 207121_s_at | MAPK6 |
| 3 | 203218_at | MAPK9 |
| 4 | 200885_at | RHOC |
| 5 | 200059_s_at | RHOA |
| 6 | 218236_s_at | PRKD3 |
| 7 | 206702_at | TEK |
| 8 | 221016_s_at | TCF7L1 |
| 9 | 203238_s_at | NOTCH3 |
| 10 | 202273_at | PDGFRB |
| 11 | 205247_at | NOTCH4 |
| 12 | 32137_at | JAG2 |
| 13 | 204484_at | PIK3C2B |
| 14 | 202743_at | PIK3R3 |
| 15 | 205846_at | PTPRB |
| 16 | 203934_at | KDR |
| 17 | 202668_at | EFNB2 |
| 18 | 212099_at | RHOB |
| 19 | 219304_s_at | PDGFD |
| 20 | 210220_at | FZD2 |
| 21 | 204422_s_at | FGF2 |
| 22 | 202647_s_at | NRAS |
| 23 | 202095_s_at | BIRC5 |
| 24 | 219257_s_at | SPHK1 |
| 25 | 205962_at | PAK2 |
| 26 | 205897_at | NFATC4 |
| 27 | 208041_at | GRK1 |
| 28 | 208095_s_at | SRP72 |
| 29 | 200885_at | RHOC |
| 30 | 212294_at | GNG12 |
| 31 | 208736_at | ARPC3 |
| 32 | 217898_at | C15orf24 |
| 33 | 200059_s_at | RHOA |
| 34 | 207157_s_at | GNG5 |
| 35 | 208640_at | RAC1 |
| 36 | 201921_at | GNG10 |
| 37 | 209239_at | NFKB1 |
| 38 | 211963_s_at | ARPC5 |
| 39 | 204396_s_at | GRK5 |
| 40 | 201473_at | JUNB |
| 41 | 201466_s_at | JUN |
| 42 | 212099_at | RHOB |
| 43 | 202112_at | VWF |
| 44 | 213222_at | PLCB1 |
| 45 | 203896_s_at | PLCB4 |
| 46 | 202647_s_at | NRAS |
| 47 | 219918_s_at | ASPM |
| 48 | 217820_s_at | ENAH |
| 49 | 202647_s_at | NRAS |
| 50 | 205055_at | ITGAE |
| 51 | 200950_at | ARPC1A |
| 52 | 203065_s_at | CAV1 |
| 53 | 208750_s_at | ARF1 |
| 54 | 201659_s_at | ARL1 |
| 55 | 200059_s_at | RHOA |
| 56 | 201097_s_at | ARF4 |
| 57 | 204732_s_at | TRIM23 |
| 58 | 219431_at | ARHGAP10 |
| 59 | 209081_s_at | COL18A1 |
| 60 | 216264_s_at | LAMB2 |
| 61 | 210105_s_at | FYN |
| 62 | 204484_at | PIK3C2B |
| 63 | 202743_at | PIK3R3 |
| 64 | 204543_at | RAPGEF1 |
| 65 | 221180_at | YSK4 |
| 66 | 206044_s_at | BRAF |
| 67 | 217644_s_at | SOS2 |
| 68 | 206370_at | PIK3CG |
| 69 | 213475_s_at | ITGAL |
| 70 | 205718_at | ITGB7 |
| 71 | 221016_s_at | TCF7L1 |
| 72 | 205656_at | PCDH17 |
| 73 | 219656_at | PCDH12 |
| 74 | 204677_at | CDH5 |
| 75 | 204726_at | CDH13 |
| 76 | 208712_at | CCND1 |
| 77 | 213222_at | PLCB1 |
| 78 | 219427_at | FAT4 |
| 79 | 201921_at | GNG10 |
| 80 | 202981_x_at | SIAH1 |
| 81 | 201375_s_at | PPP2CB |
| 82 | 201218_at | CTBP2 |
| 83 | 200765_x_at | CTNNA1 |
| 84 | 208652_at | PPP2CA |
| 85 | 212294_at | GNG12 |
| 86 | 203896_s_at | PLCB4 |
| 87 | 220085_at | HELLS |
| 88 | 202468_s_at | CTNNAL1 |
| 89 | 206194_at | HOXC4 |
| 90 | 206858_s_at | HOXC6 |
| 91 | 201321_s_at | SMARCC2 |

*The Probeset ID refers to the identification no. of the Affymetrix HG-U133A Chip.

TABLE 6

| | | Grade | | Subtype/Cell | Clusters | also on |
|---|---|---|---|---|---|---|
| Chip # | Genevestigator_Chip Title | Thoenes | Stage | line | to Group | SNP array |
| 1 | RCC_clear cell_BI_rep1 | 2 | 2 | clear cell RCC | B | yes |
| 2 | RCC_clear cell_BI_rep2 | 2 | 2 | clear cell RCC | B | no |
| 3 | RCC_clear cell_BI_rep5 | 2 | 2 | clear cell RCC | A | no |
| 4 | RCC_clear cell_S1_BI_rep1 | 2 | 1 | clear cell RCC | C | yes |
| 5 | RCC_clear cell_S1_BI_rep2 | 1 | 2 | clear cell RCC | B | no |
| 6 | RCC_clear cell_S1_BI_rep3 | 2 | 2 | clear cell RCC | B | yes (out) |
| 7 | RCC_clear cell_S1_BI_rep4 | 1 | 1 | clear cell RCC | A | no |
| 8 | RCC_clear cell_S1_BI_rep5 | 2 | 2 | clear cell RCC | B | yes (out) |
| 9 | RCC_clear cell_S3_BI_rep1 | 3 | 3 | clear cell RCC | B | yes (out) |
| 10 | RCC_clear cell_S3_BI_rep2 | 2 | 3 | clear cell RCC | A | no |
| 11 | RCC_clear cell_S3_BI_rep3 | 3 | 2 | clear cell RCC | C | yes |
| 12 | RCC_clear cell_S3_BI_rep4 | 2 | 3 | clear cell RCC | C | yes |
| 13 | RCC_clear cell_S3_BI_rep5 | 2 | 3 | clear cell RCC | A | no |
| 14 | RCC_clear cell_S3_BI_rep6 | 3 | 3 | clear cell RCC | A | yes |
| 15 | RCC_clear cell_S4_BI_rep1 | 1 | 3 | clear cell RCC | C | yes |
| 16 | RCC_clear cell_S4_BI_rep2 | 1 | 3 | clear cell RCC | A | yes (out) |
| 17 | RCC_clear cell_S4_BI_rep3 | 2 | 3 | clear cell RCC | C | yes (out) |
| 18 | RCC_clear cell_S4_BI_rep4 | 2 | 3 | clear cell RCC | B | no |
| 19 | RCC_clear cell_S4_BI_rep5 | 2 | 3 | clear cell RCC | C | no |
| 20 | RCC_clear cell_S4_BI_rep6 | 2 | 2 | clear cell RCC | B | yes (out) |
| 21 | RCC_clear cell_BII_rep1 | 2 | 3 | clear cell RCC | B | yes (out) |
| 22 | RCC_clear cell_BII_rep2 | 2 | 2 | clear cell RCC | B | yes (out) |
| 23 | RCC_clear cell_BII_rep3 | 2 | 2 | clear cell RCC | B | yes |
| 24 | RCC_clear cell_BII_rep4 | 2 | 3 | clear cell RCC | A | no |
| 25 | RCC_clear cell_BII_rep5 | 1 | 1 | clear cell RCC | A | yes |
| 26 | RCC_clear cell_BII_rep6 | 2 | 2 | clear cell RCC | A | yes |
| 27 | RCC_clear cell_BII_rep7 | 2 | 2 | clear cell RCC | C | no |
| 28 | RCC_clear cell_BII_rep8 | 1 | 1 | clear cell RCC | A | yes |
| 29 | RCC_clear cell_BII_rep9 | 1 | 1 | clear cell RCC | A | yes |
| 30 | RCC_clear cell_BII_rep10 | 1 | 1 | clear cell RCC | A | yes |
| 31 | RCC_clear cell_BII_rep11 | 2 | 3 | clear cell RCC | A | yes |
| 32 | RCC_clear cell_BII_rep12 | 1 | 1 | chromophobe RCC | C | no |
| 33 | RCC_clear cell_BII_rep13 | 1 | 1 | clear cell RCC | A | no |
| 34 | RCC_clear cell_BII_rep14 | 2 | 1 | clear cell RCC | A | no |
| 35 | RCC_clear cell_BII_rep15 | 1 | 3 | clear cell RCC | A | yes |
| 36 | RCC_clear cell_BII_rep16 | 1 | 2 | clear cell RCC | A | no |
| 37 | RCC_clear cell_BII_rep17 | 2 | 3 | clear cell RCC | A | yes |
| 38 | RCC_clear cell_BII_rep18 | 1 | 1 | clear cell RCC | A | no |
| 39 | RCC_clear cell_BII_rep19 | 1 | 1 | clear cell RCC | A | yes (out) |
| 40 | RCC_clear cell_BII_rep20 | 1 | 1 | clear cell RCC | A | yes |
| 41 | RCC_clear cell_BII_rep21 | 2 | 1 | clear cell RCC | A | yes |
| 42 | RCC_clear cell_BII_rep22 | 1 | 1 | clear cell RCC | A | yes |
| 43 | RCC_clear cell_BII_rep23 | 2 | 1 | clear cell RCC | A | yes (out) |
| 44 | RCC_clear cell_BII_rep24 | 3 | 3 | clear cell RCC | C | yes (out) |
| 45 | RCC_clear cell_BII_rep25 | 1 | 1 | clear cell RCC and | C | yes |
| | | | | papillary RCC | | |
| 46 | RCC_clear cell_BII_rep26 | 1 | 1 | clear cell RCC | A | no |
| 47 | RCC_clear cell_BII_rep27 | 1 | 1 | clear cell RCC | A | yes (out) |
| 48 | RCC_clear cell_BII_rep28 | 2 | 2 | clear cell RCC | A | yes (out) |
| 49 | RCC_clear cell_BII_rep29 | 1 | 3 | clear cell RCC | A | no |
| 50 | RCC_clear cell_BII_rep30 | 1 | 1 | clear cell RCC | B | no |
| 51 | RCC_clear cell_BII_rep31 | 1 | 1 | clear cell RCC | A | no |
| 52 | RCC_clear cell_BII_rep32 | 2 | 3 | clear cell RCC | A | no |
| 53 | RCC_clear cell_BII_rep33 | 1 | 3 | clear cell RCC | C | no |
| 54 | RCC_clear cell_BII_rep34 | 1 | 3 | clear cell RCC | A | no |
| 55 | RCC_clear cell_BII_rep35 | — | — | Metastasis | B | no |
| 56 | RCC_clear cell_BII_rep36 | 1 | 1 | clear cell RCC | A | no |
| 57 | RCC_clear cell_BII_rep37 | 1 | 1 | clear cell RCC | A | no |
| 58 | RCC_clear cell_BII_rep38 | 2 | 3 | clear cell RCC | A | yes |
| 59 | RCC_clear cell_BII_rep39 | 2 | 2 | clear cell RCC | A | yes |
| 60 | RCC_clear cell_BII_rep40 | 2 | 2 | papillary RCC | C | yes (out) |
| 61 | RCC_clear cell_BII_rep41 | 2 | 3 | clear cell RCC | C | yes |
| 62 | RCC_clear cell_BII_rep42 | 1 | 1 | clear cell RCC | A | no |
| 63 | RCC_clear cell_S1_BII_rep1 | 1 | 2 | clear cell RCC | B | yes (out) |
| 64 | RCC_clear cell_S1_BII_rep2 | 1 | 1 | clear cell RCC | A | yes |
| 65 | RCC_clear cell_S1_BII_rep3 | 1 | 1 | clear cell RCC | A | yes |
| 66 | RCC_clear cell_S1_BII_rep4 | 1 | 1 | clear cell RCC | A | yes |
| 67 | RCC_clear cell_S1_BII_rep5 | 2 | 1 | clear cell RCC | A | yes |
| 68 | RCC_clear cell_S2_BII_rep1 | 1 | 2 | chromophobe RCC | B | yes |
| 69 | RCC_clear cell_S2_BII_rep2 | 1 | 2 | clear cell RCC | A | no |
| 70 | RCC_clear cell_S2_BII_rep3 | 1 | 2 | clear cell RCC | A | yes |
| 71 | RCC_clear cell_S3_BII_rep1 | 1 | 3 | clear cell RCC | B | no |
| 72 | RCC_clear cell_S3_BII_rep2 | 1 | 3 | clear cell RCC | B | no |
| 73 | RCC_clear cell_S3_BII_rep3 | 1 | 3 | clear cell RCC | A | no |
| 74 | RCC_clear cell_S3_BII_rep4 | 1 | 3 | clear cell RCC | A | yes |
| 75 | RCC_clear cell_S3_BII_rep5 | 2 | 3 | clear cell RCC | A | no |
| 76 | RCC_clear cell_S3_BII_rep6 | 1 | 3 | clear cell RCC | A | yes (out) |
| 77 | RCC_clear cell_S3_BII_rep7 | 2 | 3 | clear cell RCC | A | yes (out) |
| 78 | RCC_clear cell_S4_BII_rep1 | 1 | 3 | clear cell RCC | B | no |
| 79 | RCC_clear cell_S4_BII_rep2 | 1 | 1 | clear cell RCC | A | no |
| 80 | RCC_papillary_BI_rep1 | 2 | 2 | papillary RCC | A | no |
| 81 | RCC_papillary_BI_rep2 | 2 | 2 | papillary RCC | B | no |
| 82 | RCC_papillary_BI_rep3 | 1 | 1 | papillary RCC | C | yes |
| 83 | RCC_papillary_BI_rep5 | 2 | 3 | papillary RCC | C | no |
| 84 | RCC_papillary_BI_rep6 | 1 | 3 | papillary RCC | B | no |
| 85 | RCC_papillary_BI_rep7 | 2 | 2 | papillary RCC | B | no |
| 86 | RCC_papillary_BI_rep8 | 3 | 2 | papillary RCC | B | no |
| 87 | RCC_papillary_S1_BI_rep1 | 1 | 1 | papillary RCC | C | yes |
| 88 | RCC_papillary_S1_BI_rep2 | 1 | 1 | papillary RCC | C | yes |
| 89 | RCC_papillary_S2_BI_rep1 | 2 | 2 | papillary RCC | B | no |
| 90 | RCC_papillary_S2_BI_rep2 | 2 | 2 | papillary RCC | C | yes |
| 91 | RCC_papillary_S4_BI_rep1 | 2 | 3 | papillary RCC | C | yes |
| 92 | RCC_papillary_S4_BI_rep2 | 1 | 2 | papillary RCC | B | yes (out) |
| 93 | RCC_papillary_BII_rep1 | 2 | 3 | papillary RCC | C | yes |
| 94 | RCC_papillary_BII_rep2 | 1 | 2 | papillary RCC | C | yes |
| 95 | RCC_papillary_BII_rep3 | 1 | 1 | papillary RCC | C | yes |
| 96 | RCC_papillary_BII_rep4 | 1 | 1 | papillary RCC | C | no |
| 97 | RCC_papillary_BII_rep5 | 1 | 1 | papillary RCC | C | no |
| 98 | RCC_papillary_BII_rep6 | 1 | 1 | papillary RCC | C | no |
| 99 | RCC_papillary_BII_rep7 | 3 | 3 | clear cell RCC and | C | no |
| | | | | papillary RCC | | |
| 100 | RCC_meta._BI_rep1 | — | — | Metastasis | C | no |
| 101 | RCC_meta._BI_rep2 | — | — | Metastasis | A | no |
| 102 | RCC_meta._BI_rep3 | — | — | Metastasis | C | no |
| 103 | RCC_meta._BI_rep4 | — | — | Metastasis | C | no |
| 104 | RCC_meta._BI_rep5 | — | — | Metastasis | C | no |
| 105 | RCC_meta._BI_rep6 | — | — | Metastasis | C | no |
| 106 | RCC_meta._BI_rep7 | — | — | Metastasis | C | no |
| 107 | RCC_meta._BI_rep8 | — | — | Metastasis | C | no |
| 108 | RCC_meta._BI_rep9 | — | — | Metastasis | C | no |
| 109 | RCC_meta._BI_rep10 | — | — | Metastasis | C | no |
| 110 | RCC_meta._BI_rep11 | — | — | Metastasis | C | no |
| 111 | RCC_meta._BI_rep12 | — | — | Metastasis | C | no |
| 112 | RCC_meta._BI_rep13 | — | — | Metastasis | A | no |
| 113 | RCC_meta._BI_rep14 | — | — | Metastasis | A | no |
| 114 | RCC_cell line_BI_rep1 | — | — | UMRC2 | NA | no |
| 115 | RCC_cell line_BI_rep2 | — | — | SLR24 | NA | no |
| 116 | RCC_cell line_BI_rep3 | — | — | A-498 | NA | no |
| 117 | RCC_cell line_BI_rep4 | — | — | SK-RC 52 | NA | no |
| 118 | RCC_cell line_BI_rep5 | — | — | 786O (vhl19) | NA | no |
| 119 | RCC_cell line_BI_rep6 | — | — | UMRC 6 | NA | no |
| 120 | RCC_cell line_BI_rep7 | — | — | ACHN | NA | no |
| 121 | RCC_cell line_BI_rep8 | — | — | 786O (vhl30) | NA | no |
| 122 | RCC_cell line_BI_rep9 | — | — | A-704 | NA | no |
| 123 | RCC_cell line_BI_rep10 | — | — | SLR 26 | NA | no |
| 124 | RCC_cell line_BI_rep11 | — | — | Caki-1 | NA | no |
| 125 | RCC_cell line_BI_rep12 | — | — | RCC4 (vhl) | NA | no |
| 126 | RCC_cell line_BI_rep13 | — | — | 769-P | NA | no |
| 127 | RCC_cell line_BI_rep14 | — | — | KC 12 | NA | no |
| 128 | RCC_cell line_BI_rep15 | — | — | RCC4 (neo) | NA | no |
| 129 | RCC_cell line_BI_rep16 | — | — | SK-RC 29 | NA | no |
| 130 | RCC_cell line_BI_rep17 | — | — | SW 156 | NA | no |
| 131 | RCC_cell line_BI_rep18 | — | — | SK-RC 31 | NA | no |
| 132 | RCC_cell line_BI_rep19 | — | — | SLR 22 | NA | no |
| 133 | RCC_cell line_BI_rep20 | — | — | SK-RC 38 | NA | no |
| 134 | RCC_cell line_BI_rep21 | — | — | 786-O | NA | no |
| 135 | RCC_cell line_BI_rep22 | — | — | SK-RC 42 | NA | no |
| 136 | RCC_cell line_BI_rep23 | — | — | 786O | NA | no |
| 137 | RCC_cell line_meta._BI_rep1 | — | — | SLR 25 | NA | no |
| 138 | RCC_cell line_meta._BI_rep2 | — | — | SLR 20 | NA | no |
| 139 | RCC_cell line_meta._BI_rep3 | — | — | Caki-2 | NA | no |
| 140 | RCC_cell line_meta._BI_rep4 | — | — | SLR 21 | NA | no |
| 141 | RCC_cell line_meta._BI_rep5 | — | — | KU 19-20 | NA | no |
| 142 | RCC_cell line_meta._BI_rep6 | — | — | SLR 23 | NA | no |
| 143 | RCC_prost. can. cell line_BI_rep1 | — | — | PC3 hep 27 | NA | no |
| 144 | RCC_prost. can. cell line_BI_rep2 | — | — | PC3 hep 30 | NA | no |
| 145 | RCC_prost. can. cell line_BI_rep3 | — | — | PC3 vec 1 | NA | no |
| 146 | RCC_prost. can. cell line_BI_rep4 | — | — | PC3 vec 3 | NA | no |
| 147 | RCC_kidney cell line_BI_rep1 | — | — | HK-2 | NA | no |

TABLE 7

| | | | Percent |
|---|---|---|---|
| | | Percent | of gene |
| | | of gene | hit |
| | | hit | against |
| | | against | total Nr. |
| Pathway Name (Panther | Nr. of | total Nr. | pathway |
| Accession Nr.) | genes * | genes | hits |
| 2-arachidonoylglycerol | 2 | 0.2 | 0.4 |
| biosynthesis (P05726) | | | |
| 5-Hydroxytryptamine degredation | 1 | 0.1 | 0.2 |
| (P04372) | | | |
| 5HT1 type receptor mediated | 4 | 0.4 | 0.8 |
| signaling pathway (P04373) | | | |
| 5HT2 type receptor mediated | 10 | 1 | 2 |
| signaling pathway (P04374) | | | |
| 5HT3 type receptor mediated | 2 | 0.2 | 0.4 |
| signaling pathway (P04375) | | | |
| 5HT4 type receptor mediated | 4 | 0.4 | 0.8 |
| signaling pathway (P04376) | | | |
| Adenine and hypoxanthine salvage | 2 | 0.2 | 0.4 |
| pathway (P02723) | | | |
| Adrenaline and noradrenaline | 2 | 0.2 | 0.4 |
| biosynthesis (P00001) | | | |
| Alpha adrenergic receptor signaling | 6 | 0.6 | 1.2 |
| pathway (P00002) | | | |
| Alzheimer disease-amyloid | 6 | 0.6 | 1.2 |
| secretase pathway (P00003) | | | |
| Alzheimer disease-presenilin | 8 | 0.8 | 1.6 |
| pathway (P00004) | | | |
| Angiogenesis (P00005) | 21 | 2.2 | 4.3 |
| Angiotensin II-stimulated signaling | 4 | 0.4 | 0.8 |
| through G proteins and beta-arrestin | | | |
| (P05911) | | | |
| Apoptosis signaling pathway | 15 | 1.5 | 3 |
| (P00006) | | | |
| Axon guidance mediated by | 2 | 0.2 | 0.4 |
| Slit/Robo (P00008) | | | |
| Axon guidance mediated by netrin | 2 | 0.2 | 0.4 |
| (P00009) | | | |
| Axon guidance mediated by | 2 | 0.2 | 0.4 |
| semaphorins (P00007) | | | |
| B cell activation (P00010) | 12 | 1.2 | 2.4 |
| Beta1 adrenergic receptor signaling | 6 | 0.6 | 1.2 |
| pathway (P04377) | | | |
| Beta2 adrenergic receptor signaling | 6 | 0.6 | 1.2 |
| pathway (P04378) | | | |
| Beta3 adrenergic receptor signaling | 4 | 0.4 | 0.8 |
| pathway (P04379) | | | |
| Cadherin signaling pathway | 4 | 0.4 | 0.8 |
| (P00012) | | | |
| Cortocotropin releasing factor | 4 | 0.4 | 0.8 |
| receptor signaling pathway | | | |
| (P04380) | | | |
| Cytoskeletal regulation by Rho | 8 | 0.8 | 1.6 |
| GTPase (P00016) | | | |
| Dopamine receptor mediated | 7 | 0.7 | 1.4 |
| signaling pathway (P05912) | | | |
| EGF receptor signaling pathway | 10 | 1 | 2 |
| (P00018) | | | |
| Endogenous_cannabinoid_signaling | 2 | 0.2 | 0.4 |
| (P05730) | | | |
| Endothelin signaling pathway | 13 | 1.3 | 2.6 |
| (P00019) | | | |
| Enkephalin release (P05913) | 4 | 0.4 | 0.8 |
| FAS signaling pathway (P00020) | 6 | 0.6 | 1.2 |
| FGF signaling pathway (P00021) | 14 | 1.4 | 2.8 |
| Formyltetrahydroformate | 2 | 0.2 | 0.4 |
| biosynthesis (P02743) | | | |
| Heterotrimeric G-protein signaling | 12 | 1.2 | 2.4 |
| pathway-Gi alpha and Gs alpha | | | |
| mediated pathway (P00026) | | | |
| Heterotrimeric G-protein signaling | 12 | 1.2 | 2.4 |
| pathway-Gq alpha and Go alpha | | | |
| mediated pathway (P00027) | | | |
| Heterotrimeric G-protein signaling | 2 | 0.2 | 0.4 |
| pathway-rod outer segment | | | |
| phototransduction (P00028) | | | |
| Histamine H1 receptor mediated | 6 | 0.6 | 1.2 |
| signaling pathway (P04385) | | | |
| Histamine H2 receptor mediated | 2 | 0.2 | 0.4 |
| signaling pathway (P04386) | | | |
| Huntington disease (P00029) | 12 | 1.2 | 2.4 |
| Inflammation mediated by | 33 | 3.4 | 6.7 |
| Chemokine and cytokine signaling | | | |
| pathway (P00031) | | | |
| Insulin/IGF pathway-mitogen | 4 | 0.4 | 0.8 |
| activated protein kinase | | | |
| kinase/MAP kinase cascade | | | |
| (P00032) | | | |
| Insulin/IGF pathway-protein kinase | 2 | 0.2 | 0.4 |
| B signaling cascade (P00033) | | | |
| Integrin signalling pathway | 20 | 2.1 | 4.1 |
| (P00034) | | | |
| Interferon-gamma signaling | 4 | 0.4 | 0.8 |
| pathway (P00035) | | | |
| Interleukin signaling pathway | 8 | 0.8 | 1.6 |
| (P00036) | | | |
| Ionotropic glutamate receptor | 2 | 0.2 | 0.4 |
| pathway (P00037) | | | |
| JAK/STAT signaling pathway | 2 | 0.2 | 0.4 |
| (P00038) | | | |
| Metabotropic glutamate receptor | 2 | 0.2 | 0.4 |
| group I pathway (P00041) | | | |
| Metabotropic glutamate receptor | 4 | 0.4 | 0.8 |
| group II pathway (P00040) | | | |
| Metabotropic glutamate receptor | 6 | 0.6 | 1.2 |
| group III pathway (P00039) | | | |
| Methylcitrate cycle (P02754) | 2 | 0.2 | 0.4 |
| Muscarinic acetylcholine receptor 1 | 6 | 0.6 | 1.2 |
| and 3 signaling pathway (P00042) | | | |
| Muscarinic acetylcholine receptor 2 | 6 | 0.6 | 1.2 |
| and 4 signaling pathway (P00043) | | | |
| Nicotinic acetylcholine receptor | 6 | 0.6 | 1.2 |
| signaling pathway (P00044) | | | |
| Notch signaling pathway (P00045) | 2 | 0.2 | 0.4 |
| Opioid prodynorphin pathway | 4 | 0.4 | 0.8 |
| (P05916) | | | |
| Opioid proenkephalin pathway | 4 | 0.4 | 0.8 |
| (P05915) | | | |
| Opioid proopiomelanocortin | 4 | 0.4 | 0.8 |
| pathway (P05917) | | | |
| Oxidative stress response (P00046) | 13 | 1.3 | 2.6 |
| Oxytocin receptor mediated | 10 | 1 | 2 |
| signaling pathway (P04391) | | | |
| PDGF signaling pathway (P00047) | 11 | 1.1 | 2.2 |
| PI3 kinase pathway (P00048) | 4 | 0.4 | 0.8 |
| Parkinson disease (P00049) | 8 | 0.8 | 1.6 |
| Ras Pathway (P04393) | 6 | 0.6 | 1.2 |
| Synaptic_vesicle_trafficking | 2 | 0.2 | 0.4 |
| (P05734) | | | |
| T cell activation (P00053) | 10 | 1 | 2 |
| TCA cycle (P00051) | 2 | 0.2 | 0.4 |
| TGF-beta signaling pathway | 10 | 1 | 2 |
| (P00052) | | | |
| Thyrotropin-releasing hormone | 8 | 0.8 | 1.6 |
| receptor signaling pathway | | | |
| (P04394) | | | |
| Toll receptor signaling pathway | 2 | 0.2 | 0.4 |
| (P00054) | | | |
| Transcription regulation by bZIP | 2 | 0.2 | 0.4 |
| transcription factor (P00055) | | | |
| Ubiquitin proteasome pathway | 2 | 0.2 | 0.4 |
| (P00060) | | | |
| VEGF signaling pathway (P00056) | 11 | 1.1 | 2.2 |
| Wnt signaling pathway (P00057) | 18 | 1.8 | 3.7 |
| p38 MAPK pathway (P05918) | 1 | 0.1 | 0.2 |
| p53 pathway feedback loops 2 | 2 | 0.2 | 0.4 |
| (P04398) | | | |
| p53 pathway (P00059) | 8 | 0.8 | 1.6 |

* double value is shown, as candidates were blasted against Celera and NCBI (H. sapiens)

TABLE 8

| | Gene | | Gene | | Gene | | Gene |
|---|---|---|---|---|---|---|---|
| Angiogenesis | Symbol | Inflammation | Symbol | Integrin | Symbol | Wnt | Symbol |
| cluster I - | | cluster I - | | cluster I - | | cluster I - | |
| Probe Set ID* | | Probe Set ID* | | Probe Set ID* | | Probe Set ID* | |
| 202677_at | RASA1 | 205962_at | PAK2 | 217820_s_at | ENAH | 221016_s_at | TCF7L1 |
| 207121_s_at | MAPK6 | 205897_at | NFATC4 | 202647_s_at | NRAS | 205656_at | PCDH17 |
| 203218_at | MAPK9 | 208041_at | GRK1 | 205055_at | ITGAE | 219656_at | PCDH12 |
| 200885_at | RHOC | | | 200950_at | ARPC1A | 204677_at | CDH5 |
| 200059_s_at | RHOA | | | 203065_s_at | CAV1 | 204726_at | CDH13 |
| 218236_s_at | PRKD3 | | | | | 208712_at | CCND1 |
| | | | | | | 213222_at | PLCB1 |
| | | | | | | 219427_at | FAT4 |
| cluster II - | | cluster II - | | cluster II - | | cluster II - | |
| Probe Set ID* | | Probe Set ID* | | Probe Set ID* | | Probe Set ID* | |
| 206702_at | TEK | 208095_s_at | SRP72 | 208750_s_at | ARF1 | 201921_at | GNG10 |
| 221016_s_at | TCF7L1 | 200885_at | RHOC | 201659_s_at | ARL1 | 202981_x_at | SIAH1 |
| 203238_s_at | NOTCH3 | 212294_at | GNG12 | 200059_s_at | RHOA | 201375_s_at | PPP2CB |
| 202273_at | PDGFRB | 208736_at | ARPC3 | 201097_s_at | ARF4 | 201218_at | CTBP2 |
| 205247_at | NOTCH4 | 217898_at | C15orf24 | | | 200765_x_at | CTNNA1 |
| 32137_at | JAG2 | 200059_s_at | RHOA | | | 208652_at | PPP2CA |
| 204484_at | PIK3C2B | 207157_s_at | GNG5 | | | 212294_at | GNG12 |
| 202743_at | PIK3R3 | 208640_at | RAC1 | | | | |
| 205846_at | PTPRB | 201921_at | GNG10 | | | | |
| 203934_at | KDR | 209239_at | NFKB1 | | | | |
| 202668_at | EFNB2 | 211963_s_at | ARPC5 | | | | |
| 212099_at | RHOB | | | | | | |
| 219304_s_at | PDGFD | | | | | | |
| cluster III - | | cluster III - | | cluster III - | | cluster III - | |
| Probe Set ID* | | Probe Set ID* | | Probe Set ID* | | Probe Set ID* | |
| 210220_at | FZD2 | 204396_s_at | GRK5 | 204732_s_at | TRIM23 | 203896_s_at | PLCB4 |
| 204422_s_at | FGF2 | 201473_at | JUNB | 219431_at | ARHGAP10 | 220085_at | HELLS |
| 202647_s_at | NRAS | 201466_s_at | JUN | 209081_s_at | COL18A1 | 202468_s_at | CTNNAL1 |
| 202095_s_at | BIRC5 | 212099_at | RHOB | 216264_s_at | LAMB2 | | |
| 219257_s_at | SPHK1 | 202112_at | VWF | 210105_s_at | FYN | | |
| | | 213222_at | PLCB1 | 204484_at | PIK3C2B | | |
| | | | | 202743_at | PIK3R3 | | |
| | | cluster IV - | | cluster IV - | | cluster IV - | |
| | | Probe Set ID* | | Probe Set ID* | | Probe Set ID* | |
| | | 203896_s_at | PLCB4 | 204543_at | RAPGEF1 | 206194_at | HOXC4 |
| | | 202647_s_at | NRAS | 221180_at | YSK4 | 206858_s_at | HOXC6 |
| | | 219918_s_at | ASPM | 206044_s_at | BRAF | 201321_s_at | SMARCC2 |
| | | | | 217644_s_at | SOS2 | | |
| | | | | 206370_at | PIK3CG | | |
| | | | | 213475_s_at | ITGAL | | |
| | | | | 205718_at | ITGB7 | | |

*The Probeset ID refers to the identification no. of the Affymetrix HG-U133A Chip.

TABLE 9

| | Group A | | | Group B | | | Group C | | |
|---|---|---|---|---|---|---|---|---|---|
| | CD34 | DEK | MSH6 | CD34 | DEK | MSH6 | CD34 | DEK | MSH6 |
| Tumor | high | 1 | 2 | low | 3 | 0 | low | 0 | 0 |
| 1 | MVD | | | MVD | | | MVD | | |
| Tumor | high | 1 | 1 | high | 1 | 0 | low | 2 | 2 |
| 2 | MVD | | | MVD | | | MVD | | |
| Tumor | high | 2 | 2 | high | 0 | 0 | low | 1 | 1 |
| 3 | MVD | | | MVD | | | MVD | | |
| Tumor | high | 0 | 0 | high | 0 | 0 | low | 2 | 0 |
| 4 | MVD | | | MVD | | | MVD | | |
| Tumor | high | 1 | 1 | low | 0 | 0 | low | 0 | 0 |
| 5 | MVD | | | MVD | | | MVD | | |
| Tumor | high | 2 | 1 | low | 0 | 0 | low | 1 | 0 |
| 6 | MVD | | | MVD | | | MVD | | |
| Tumor | high | 2 | 2 | low | 0 | 0 | low | 2 | 2 |
| 7 | MVD | | | MVD | | | MVD | | |
| Tumor | high | 2 | 2 | low | 0 | 0 | low | 0 | 1 |
| 8 | MVD | | | MVD | | | MVD | | |
| Tumor | high | 1 | 2 | low | 0 | 0 | low | 2 | 2 |
| 9 | MVD | | | MVD | | | MVD | | |

0 = negative, 1 = weak staining intensity, 2 = moderate staining intensity, 3 = strong staining intensity

TABLE 10

| No. | ProbeSet ID | S | T* | Entrez | SEQ |
|---|---|---|---|---|---|
| 1 | 221860_at | 1 | 3.3441 | 3191 | 131 |
| 2 | 219754_at | 1 | 2.8455 | 55285 | 132 |
| 3 | 211454_x_at | 1 | 3.8185 | 400949 | 133 |
| 4 | 216112_at | 1 | 1.3782 | — | 134 |
| 5 | 211386_at | 1 | 1.8448 | 84786 | 135 |
| 6 | 33768_at | 1 | 1.5069 | 1762 | 136 |
| 7 | 206789_s_at | 1 | 2.0255 | 5451 | 137 |
| 8 | 215338_s_at | 1 | 2.9496 | 4820 | 138 |
| 9 | 32029_at | 1 | 2.4556 | 5170 | 139 |
| 10 | 212487_at | 1 | 2.8105 | 23131 | 140 |
| 11 | 222368_at | 1 | 2.0125 | — | 141 |
| 12 | 222366_at | 1 | 2.8874 | — | 142 |
| 13 | 204771_s_at | 1 | 3.2049 | 7270 | 143 |
| 14 | 213813_x_at | 1 | 2.8246 | — | 144 |
| 15 | 212783_at | 1 | 2.8134 | 5930 | 145 |
| 16 | 221191_at | 1 | 1.2696 | 54441 | 146 |
| 17 | 216527_at | 1 | 1.2548 | — | 147 |
| 18 | 215545_at | 1 | 1.2992 | — | 148 |
| 19 | 220905_at | 1 | 2.7221 | — | 149 |
| 20 | 208662_s_at | 1 | 3.4742 | 7267 | 150 |
| 21 | 208120_x_at | 1 | 3.3528 | 400949 | 151 |
| 22 | 48580_at | 1 | 2.9000 | 30827 | 152 |
| 23 | 213185_at | 1 | 1.6378 | 23247 | 153 |
| 24 | 203496_s_at | 1 | 2.7044 | 5469 | 154 |
| 25 | 203701_s_at | 1 | 1.6273 | 55621 | 155 |
| 26 | 207186_s_at | 1 | 3.5894 | 2186 | 156 |
| 27 | 219437_s_at | 1 | 3.5114 | 29123 | 157 |
| 28 | 212317_at | 1 | 2.7809 | 23534 | 158 |
| 29 | 217994_x_at | 1 | 3.1814 | 54973 | 159 |
| 30 | 210463_x_at | 1 | 1.6328 | 55621 | 160 |
| 31 | 212994_at | 1 | 2.7464 | 57187 | 161 |
| 32 | 202379_s_at | 1 | 4.4881 | 4820 | 162 |
| 33 | 219639_x_at | 1 | 2.9579 | 56965 | 163 |
| 34 | 205178_s_at | 1 | 2.9427 | 5930 | 164 |
| 35 | 215032_at | 1 | 1.8919 | 6239 | 165 |
| 36 | 213235_at | 1 | 2.7268 | 400506 | 166 |
| 37 | 210266_s_at | 1 | 2.9143 | 51592 | 167 |
| 38 | 203297_s_at | 1 | 2.0353 | 3720 | 168 |
| 39 | 212596_s_at | 1 | 2.1500 | 10042 | 169 |
| 40 | 218555_at | 1 | 1.3394 | 29882 | 170 |
| 41 | 202774_s_at | 1 | 2.6265 | 6433 | 171 |
| 42 | 214001_x_at | 1 | 2.6765 | — | 172 |
| 43 | 212571_at | 1 | 2.3779 | 57680 | 173 |
| 44 | 202682_s_at | 1 | 3.1557 | 7375 | 174 |
| 45 | 202473_x_at | 1 | 0.9283 | 3054 | 175 |
| 46 | 214464_at | 1 | 3.9210 | 8476 | 176 |
| 47 | 206567_s_at | 1 | 2.4514 | 51230 | 177 |
| 48 | 209579_s_at | 1 | 4.2461 | 8930 | 178 |
| 49 | 34260_at | 1 | 1.0468 | 9894 | 179 |
| 50 | 214195_at | 1 | 0.9257 | 1200 | 180 |
| 51 | 219105_x_at | 1 | 2.2929 | 23594 | 181 |
| 52 | 213328_at | 1 | 2.8602 | 4750 | 182 |
| 53 | 208663_s_at | 1 | 2.9901 | 7267 | 183 |
| 54 | 214843_s_at | 1 | 2.6647 | 23032 | 184 |
| 55 | 220072_at | 1 | 2.8119 | 79848 | 185 |
| 56 | 219468_s_at | 1 | 2.1238 | 404093 | 186 |
| 57 | 220370_s_at | 1 | 1.5578 | 57602 | 187 |
| 58 | 212318_at | 1 | 2.6286 | 23534 | 188 |
| 59 | 206169_x_at | 1 | 2.8966 | 23264 | 189 |
| 60 | 201728_s_at | 1 | 2.6719 | 9703 | 190 |
| 61 | 205434_s_at | 1 | 3.3218 | 22848 | 191 |
| 62 | 203597_s_at | 1 | 2.3050 | 11193 | 192 |
| 63 | 222291_at | 1 | 2.7298 | 25854 | 193 |
| 64 | 208859_s_at | 1 | 2.8255 | 546 | 194 |
| 65 | 201959_s_at | 1 | 3.4533 | 23077 | 195 |
| 66 | 40569_at | 1 | 1.2913 | 7593 | 196 |
| 67 | 209088_s_at | 1 | 3.1422 | 29855 | 197 |
| 68 | 209945_s_at | 1 | 2.6078 | 2932 | 198 |
| 69 | 206967_at | 1 | 1.4198 | 904 | 199 |
| 70 | 206416_at | 1 | 1.4064 | 7755 | 200 |
| 71 | 205367_at | 1 | 1.2617 | 10603 | 201 |
| 72 | 222186_at | 1 | 1.7502 | 54469 | 202 |
| 73 | 208936_x_at | 1 | 2.4216 | 3964 | 203 |
| 74 | 202102_s_at | 1 | 3.5148 | 23476 | 204 |
| 75 | 213971_s_at | 1 | 2.1596 | 100292841 | 205 |
| 76 | 201680_x_at | 1 | 3.3522 | 51593 | 206 |
| 77 | 213876_x_at | 1 | 2.1010 | 8233 | 207 |
| 78 | 221350_at | 1 | 0.2892 | 3224 | 208 |
| 79 | 216525_x_at | 1 | 2.8062 | 5387 | 209 |
| 80 | 222182_s_at | 1 | 3.4695 | 4848 | 210 |
| 81 | 214473_x_at | 1 | 2.7307 | 5387 | 211 |
| 82 | 208475_at | 1 | 0.9177 | 55691 | 212 |
| 83 | 215667_x_at | 1 | 2.4823 | 100132832 | 213 |
| 84 | 219392_x_at | 1 | 4.3567 | 55771 | 214 |
| 85 | 213205_s_at | 1 | 0.3487 | 23132 | 215 |
| 86 | 222047_s_at | 1 | 3.9224 | 51593 | 216 |
| 87 | 209932_s_at | 1 | 3.8225 | 1854 | 217 |
| 88 | 219507_at | 1 | 2.6101 | 51319 | 218 |
| 89 | 204538_x_at | 1 | 4.8527 | 9284 | 219 |
| 90 | 41386_i_at | 1 | 1.0805 | 23135 | 220 |
| 91 | 214004_s_at | 1 | 4.1868 | 9686 | 221 |
| 92 | 217804_s_at | 1 | 2.7713 | 3609 | 222 |
| 93 | 216751_at | 1 | 0.6769 | — | 223 |
| 94 | 215541_s_at | 1 | 0.7933 | 1729 | 224 |
| 95 | 212028_at | 1 | 2.5778 | 58517 | 225 |
| 96 | 217576_x_at | 1 | 0.7751 | 6655 | 226 |
| 97 | 215434_x_at | 1 | 3.6643 | 100132406 | 227 |
| 98 | 212759_s_at | 1 | 2.7559 | 6934 | 228 |
| 99 | 45687_at | 1 | 3.0172 | 78994 | 229 |
| 100 | 209534_x_at | 1 | 3.0095 | 11214 | 230 |
| 101 | 213956_at | 1 | 2.3039 | 9857 | 231 |
| 102 | 202384_s_at | 1 | 1.9349 | 6949 | 232 |
| 103 | 220940_at | 1 | 3.7431 | 57730 | 233 |
| 104 | 216550_x_at | 1 | 2.9023 | 23253 | 234 |
| 105 | 201224_s_at | 1 | 2.8594 | 10250 | 235 |
| 106 | 220696_at | 1 | −0.7982 | — | 236 |
| 107 | 206565_x_at | 1 | 3.2219 | 11039 | 237 |
| 108 | 213650_at | 1 | 3.8542 | 23015 | 238 |
| 109 | 204403_x_at | 1 | 4.2212 | 9747 | 239 |
| 110 | 201856_s_at | 1 | 1.8053 | 51663 | 240 |
| 111 | 210069_at | 1 | 2.6025 | 1375 | 241 |
| 112 | 202574_s_at | 1 | 1.6621 | 1455 | 242 |
| 113 | 204741_at | 1 | 2.5709 | 636 | 243 |
| 114 | 218920_at | 1 | 2.4642 | 54540 | 244 |
| 115 | 221526_x_at | 1 | 2.9858 | 56288 | 245 |
| 116 | 208930_s_at | 1 | 3.8138 | 3609 | 246 |
| 117 | 204428_s_at | 1 | 1.7085 | 3931 | 247 |
| 118 | 214041_x_at | 1 | 3.0486 | 6168 | 248 |
| 119 | 221043_at | 1 | 0.7752 | — | 249 |
| 120 | 212451_at | 1 | 2.5922 | 9728 | 250 |
| 121 | 218808_at | 1 | 0.0000 | 55152 | 251 |
| 122 | 213311_s_at | 1 | 4.0840 | 22980 | 252 |
| 123 | 44146_at | 1 | 1.6473 | 26205 | 253 |
| 124 | 205415_s_at | 1 | 0.7316 | 4287 | 254 |
| 125 | 213729_at | 1 | 3.6076 | 55660 | 255 |
| 126 | 217734_s_at | 1 | 2.7312 | 11180 | 256 |
| 127 | 205339_at | 1 | 0.0537 | 6491 | 257 |
| 128 | 221718_s_at | 1 | 2.9493 | 11214 | 258 |
| 129 | 39650_s_at | 1 | 0.5091 | 80003 | 259 |
| 130 | 221496_s_at | 1 | 2.8841 | 10766 | 260 |
| 131 | 210094_s_at | 1 | 3.0740 | 56288 | 261 |
| 132 | 214526_x_at | 1 | 2.3316 | 5379 | 262 |
| 133 | 214723_x_at | 1 | 1.7216 | 375248 | 263 |
| 134 | 209715_at | 1 | 3.3266 | 23468 | 264 |
| 135 | 212177_at | 1 | 4.3567 | 25957 | 265 |
| 136 | 217679_x_at | 1 | 3.9197 | — | 266 |
| 137 | 213850_s_at | 1 | 4.4362 | 9169 | 267 |
| 138 | 216563_at | 1 | 2.3194 | 23253 | 268 |
| 139 | 202818_s_at | 1 | 2.9712 | 6924 | 269 |
| 140 | 221829_s_at | 1 | 4.5874 | 3842 | 270 |
| 141 | 220368_s_at | 1 | 1.4496 | 55671 | 271 |
| 142 | 210666_at | 1 | 1.3500 | 3423 | 272 |
| 143 | 211342_x_at | 1 | 2.5036 | 9968 | 273 |
| 144 | 216450_x_at | 1 | 3.3900 | 7184 | 274 |
| 145 | 212926_at | 1 | 2.0261 | 23137 | 275 |
| 146 | 208995_s_at | 1 | 2.0054 | 9360 | 276 |
| 147 | 217152_at | 1 | 0.6767 | — | 277 |
| 148 | 213277_at | 1 | −0.6754 | 677 | 278 |
| 149 | 222104_x_at | 1 | 4.0594 | 2967 | 279 |
| 150 | 215279_at | 1 | 0.9778 | — | 280 |
| 151 | 217620_s_at | 1 | 1.3042 | 5291 | 281 |
| 152 | 218742_at | 1 | 1.2959 | 64428 | 282 |
| 153 | 207605_x_at | 1 | 1.2134 | 51351 | 283 |
| 154 | 210579_s_at | 1 | −0.3495 | 10107 | 284 |
| 155 | 208803_s_at | 1 | 2.7603 | 6731 | 285 |
| 156 | 44822_s_at | 1 | 0.8390 | 54531 | 286 |
| 157 | 214870_x_at | 1 | 4.9662 | 10028844 | 287 |
| 158 | 205787_x_at | 1 | 2.0152 | 9877 | 288 |
| 159 | 213893_x_at | 1 | 2.7065 | 5383 | 289 |
| 160 | 48612_at | 1 | 1.5062 | 9683 | 290 |
| 161 | 222133_s_at | 1 | 1.4355 | 51105 | 291 |
| 162 | 212027_at | 1 | 3.5596 | 58517 | 292 |
| 163 | 222024_s_at | 1 | 3.4062 | 11214 | 293 |
| 164 | 208993_s_at | 1 | 3.0181 | 9360 | 294 |
| 165 | 205370_x_at | 1 | 4.7353 | 1629 | 295 |
| 166 | 222193_at | 1 | 0.2730 | 60526 | 296 |
| 167 | 214035_x_at | 1 | 4.8781 | 399491 | 297 |
| 168 | 201861_s_at | 1 | 4.8281 | 9208 | 298 |
| 169 | 208797_s_at | 1 | 1.1428 | 23015 | 299 |
| 170 | 204195_s_at | 1 | 0.9807 | 5316 | 300 |
| 171 | 222034_at | 1 | 1.6939 | 10399 | 301 |
| 172 | 220828_s_at | 1 | −0.4009 | 55338 | 302 |
| 173 | 208900_s_at | 1 | 3.6447 | 7150 | 303 |
| 174 | 205134_s_at | 1 | 1.5062 | 26747 | 304 |
| 175 | 216310_at | 1 | 1.3131 | 57551 | 305 |
| 176 | 201205_at | 1 | 0.5415 | 100292328 | 306 |
| 177 | 201996_s_at | 1 | 2.0236 | 23013 | 307 |
| 178 | 221501_x_at | 1 | 5.0156 | 339047 | 308 |
| 179 | 216843_x_at | 1 | 2.3442 | 5379 | 309 |
| 180 | 208879_x_at | 1 | 1.4191 | 24148 | 310 |
| 181 | 43544_at | 1 | 1.8638 | 10025 | 311 |
| 182 | 204909_at | 1 | −0.1882 | 1656 | 312 |
| 183 | 202509_s_at | 1 | 2.2336 | 7127 | 313 |
| 184 | 214395_x_at | 1 | 1.9902 | 1936 | 314 |
| 185 | 215582_x_at | 1 | 0.9031 | 8888 | 315 |
| 186 | 220796_x_at | 1 | 4.0349 | 79939 | 316 |
| 187 | 206323_x_at | 1 | 3.5161 | 4983 | 317 |
| 188 | 209136_s_at | 1 | 2.1393 | 9100 | 318 |
| 189 | 218859_s_at | 1 | 2.6581 | 51575 | 319 |
| 190 | 216212_s_at | 1 | 2.1806 | 1736 | 320 |
| 191 | 220071_x_at | 1 | 4.0476 | 55142 | 321 |
| 192 | 208994_s_at | 1 | 2.5538 | 9360 | 322 |
| 193 | 204227_s_at | 1 | 1.1780 | 7084 | 323 |
| 194 | 202773_s_at | 1 | 0.6752 | 6433 | 324 |
| 195 | 222351_at | 1 | 1.8154 | 5519 | 325 |
| 196 | 58900_at | 1 | 1.6313 | 222070 | 326 |
| 197 | 206056_x_at | 1 | 4.4435 | 6693 | 327 |
| 198 | 210251_s_at | 1 | 3.0237 | 22902 | 328 |
| 199 | 203468_at | 1 | 2.9207 | 8558 | 329 |
| 200 | 211289_x_at | 1 | 2.1424 | 728642 | 330 |
| 201 | 214052_x_at | 1 | 2.7074 | 23215 | 331 |
| 202 | 204649_at | 1 | −0.3037 | 10024 | 332 |
| 203 | 219380_x_at | 1 | 1.4667 | 5429 | 333 |
| 204 | 215848_at | 1 | 0.4399 | 49855 | 334 |
| 205 | 207598_x_at | 1 | 1.8445 | 7516 | 335 |
| 206 | 217644_s_at | 1 | 0.6763 | 6655 | 336 |
| 207 | 222249_at | 1 | −0.5170 | — | 337 |
| 208 | 218914_at | 1 | 1.2460 | 51093 | 338 |
| 209 | 212620_at | 1 | 1.2975 | 23060 | 339 |
| 210 | 208989_s_at | 1 | 1.7391 | 22992 | 340 |
| 211 | 202821_s_at | 1 | 2.0807 | 4026 | 341 |
| 212 | 213926_s_at | 1 | 2.2782 | 3267 | 342 |
| 213 | 215856_at | 1 | 0.3196 | 284266 | 343 |
| 214 | 32032_at | 1 | 2.2692 | 8220 | 344 |
| 215 | 201072_s_at | 1 | 2.1603 | 6599 | 345 |
| 216 | 208710_s_at | 1 | 3.9944 | 8943 | 346 |
| 217 | 200702_s_at | 1 | 3.8224 | 57062 | 347 |
| 218 | 217485_x_at | 1 | 2.1485 | 5379 | 348 |
| 219 | 213526_s_at | 1 | 1.3571 | 55957 | 349 |
| 220 | 220456_at | 1 | 1.6757 | 55304 | 350 |
| 221 | 214756_x_at | 1 | 2.0706 | 5379 | 351 |
| 222 | 214353_at | 1 | 0.2380 | — | 352 |
| 223 | 78495_at | 1 | 1.6266 | 155060 | 353 |
| 224 | 203204_s_at | 1 | 1.2374 | 9682 | 354 |
| 225 | 217878_s_at | 1 | 2.0496 | 996 | 355 |
| 226 | 41160_at | 1 | 2.1791 | 53615 | 356 |
| 227 | 214017_s_at | 1 | 0.0077 | 9704 | 357 |
| 228 | 214659_x_at | 1 | 2.2679 | 56252 | 358 |
| 229 | 50376_at | 1 | 2.4008 | 55311 | 359 |
| 230 | 216187_x_at | 1 | 4.4533 | — | 360 |
| 231 | 213445_at | 1 | 1.5876 | 23144 | 361 |
| 232 | 217611_at | 1 | 0.4124 | 157697 | 362 |
| 233 | 205068_s_at | 1 | 2.7417 | 23092 | 363 |
| 234 | 201635_s_at | 1 | 2.8099 | 8087 | 364 |
| 235 | 214552_s_at | 1 | 0.8368 | 9135 | 365 |
| 236 | 220962_s_at | 1 | 0.4547 | 29943 | 366 |
| 237 | 221780_s_at | 1 | 2.2823 | 55661 | 367 |
| 238 | 211097_s_at | 1 | −0.1281 | 5089 | 368 |
| 239 | 217622_at | 1 | 0.2285 | 25807 | 369 |
| 240 | 201026_at | 1 | 1.6815 | 9669 | 370 |
| 241 | 211996_s_at | 1 | 4.9230 | 100132247 | 371 |
| 242 | 220609_at | 1 | 1.7994 | 202181 | 372 |
| 243 | 213344_s_at | 1 | −0.0550 | 3014 | 373 |
| 244 | 207205_at | 1 | −0.3542 | 1089 | 374 |
| 245 | 206966_s_at | 1 | 0.0713 | 11278 | 375 |
| 246 | 208610_s_at | 1 | 4.7898 | 23524 | 376 |
| 247 | 204097_s_at | 1 | 2.7474 | 51634 | 377 |
| 248 | 211948_x_at | 1 | 4.0689 | 23215 | 378 |
| 249 | 212885_at | 1 | 2.7556 | 10199 | 379 |
| 250 | 37278_at | 1 | 0.8022 | 6901 | 380 |
| 251 | 206500_s_at | 1 | 0.8385 | 55320 | 381 |
| 252 | 214055_x_at | 1 | 4.4115 | 23215 | 382 |
| 253 | 214501_s_at | 1 | 3.9227 | 9555 | 383 |
| 254 | 214335_at | 1 | 0.1607 | 6141 | 384 |
| 255 | AFFX-M27830_5_at | 1 | 3.7141 | — | 385 |
| 256 | 221023_s_at | 1 | −0.6003 | 81033 | 386 |
| 257 | 217654_at | 1 | −0.0306 | — | 387 |
| 258 | 220466_at | 1 | 0.3488 | 80071 | 388 |
| 259 | 215605_at | 1 | 0.8272 | 10499 | 389 |
| 260 | 46142_at | 1 | 0.9219 | 64788 | 390 |
| 261 | 201024_x_at | 1 | 4.6527 | 9669 | 391 |
| 262 | 202301_s_at | 1 | 2.7863 | 65117 | 392 |
| 263 | 202414_at | 1 | 2.6600 | 2073 | 393 |
| 264 | 211886_s_at | 1 | −0.6122 | 6910 | 394 |
| 265 | 217380_s_at | 1 | −0.4102 | 7511 | 395 |
| 266 | 214250_at | 1 | 0.4289 | 4926 | 396 |
| 267 | 214911_s_at | 1 | 4.4278 | 6046 | 397 |
| 268 | 208685_x_at | 1 | 4.2214 | 6046 | 398 |
| 269 | 214693_x_at | 1 | 4.9733 | 100132406 | 399 |
| 270 | 214742_at | 1 | 0.5155 | 22994 | 400 |
| 271 | 222023_at | 1 | −0.9535 | 11214 | 401 |
| 272 | 202339_at | 1 | 1.4628 | 8189 | 402 |
| 273 | 203792_x_at | 1 | −0.0612 | 7703 | 403 |
| 274 | 221686_s_at | 1 | −0.1091 | 9400 | 404 |
| 274 | 221686_s_at | 1 | −0.1091 | 9400 | 404 |
| 275 | 212079_s_at | 1 | 1.6697 | 4297 | 405 |
| 276 | 208237_x_at | 1 | 0.1915 | 53616 | 406 |
| 277 | 221683_s_at | 1 | 1.1982 | 80184 | 407 |
| 278 | 217471_at | 1 | −0.9988 | — | 408 |
| 279 | 212106_at | 1 | 2.3823 | 23197 | 409 |
| 280 | 217498_at | 1 | −0.9042 | — | 410 |
| 281 | 220401_at | 1 | −1.0337 | 79860 | 411 |
| 282 | 81737_at | 1 | −0.4582 | — | 412 |
| 283 | 219897_at | 1 | 0.6897 | 79845 | 413 |
| 284 | 221007_s_at | 1 | 2.0715 | 81608 | 414 |
| 285 | 207349_s_at | 1 | −0.1878 | 7352 | 415 |
| 286 | 214113_s_at | −1 | 1.0133 | 9939 | 416 |
| 287 | 202919_at | −1 | 1.1561 | 25843 | 417 |
| 288 | 219485_s_at | −1 | 0.7641 | 5716 | 418 |
| 289 | 216304_x_at | −1 | 1.0802 | 10730 | 419 |
| 290 | 217959_s_at | −1 | 1.2672 | 51399 | 420 |
| 291 | 214429_at | −1 | 1.1991 | 9107 | 421 |
| 292 | 201020_at | −1 | 1.1169 | 7533 | 422 |
| 293 | 200056_s_at | −1 | 1.0703 | 10438 | 423 |
| 294 | 209551_at | −1 | 0.1229 | 84272 | 424 |
| 295 | 212268_at | −1 | 0.4909 | 1992 | 425 |
| 296 | 208992_s_at | −1 | 1.2101 | 6774 | 426 |
| 297 | 217865_at | −1 | 1.9469 | 55819 | 427 |
| 298 | 212833_at | −1 | 0.9751 | 91137 | 428 |
| 299 | 218449_at | −1 | 0.9798 | 55325 | 429 |
| 300 | 221531_at | −1 | −0.2519 | 80349 | 430 |
| 301 | 203156_at | −1 | 1.2641 | 11215 | 431 |
| 302 | 213027_at | −1 | 1.1477 | 6738 | 432 |
| 303 | 221547_at | −1 | 0.2353 | 8559 | 433 |
| 304 | 209096_at | −1 | 0.7868 | 7336 | 434 |
| 305 | 212461_at | −1 | 1.1393 | 51582 | 435 |
| 306 | 202166_s_at | −1 | −0.0224 | 5504 | 436 |
| 307 | 201176_s_at | −1 | 2.1289 | 372 | 437 |
| 308 | 212815_at | −1 | 0.5212 | 10973 | 438 |
| 309 | 219819_s_at | −1 | 0.0455 | 28957 | 439 |
| 310 | 212573_at | −1 | 0.9699 | 23052 | 440 |
| 311 | 202381_at | −1 | 1.9412 | 8754 | 441 |
| 312 | 202194_at | −1 | 2.0624 | 50999 | 442 |
| 313 | 201351_s_at | −1 | 1.2193 | 10730 | 443 |
| 314 | 203136_at | −1 | 1.4305 | 10567 | 444 |
| 315 | 211703_s_at | −1 | −0.6144 | 83941 | 445 |
| 316 | 209786_at | −1 | 0.7245 | 10473 | 446 |
| 317 | 214545_s_at | −1 | −0.8808 | 11212 | 447 |
| 318 | 204342_at | −1 | 0.5450 | 29957 | 448 |
| 319 | 212335_at | −1 | 0.9285 | 2799 | 449 |
| 320 | 202089_s_at | −1 | −0.3621 | 25800 | 450 |
| 321 | 200698_at | −1 | 1.9150 | 11014 | 451 |
| 322 | 219162_s_at | −1 | 0.3746 | 65003 | 452 |
| 323 | 203376_at | −1 | 0.7431 | 51362 | 453 |
| 324 | 218042_at | −1 | 1.3650 | 51138 | 454 |
| 325 | 213750_at | −1 | −0.0803 | 26156 | 455 |
| 326 | 220199_s_at | −1 | 0.7265 | 64853 | 456 |
| 327 | 217786_at | −1 | −0.0522 | 10419 | 457 |
| 328 | 203646_at | −1 | −0.0231 | 2230 | 458 |
| 329 | 208761_s_at | −1 | 1.3619 | 7341 | 459 |
| 330 | 202579_x_at | −1 | 1.6123 | 10473 | 460 |
| 331 | 208841_s_at | −1 | 1.7403 | 9908 | 461 |
| 332 | 218616_at | −1 | −0.4623 | 57117 | 462 |
| 333 | 217919_s_at | −1 | 0.6034 | 28977 | 463 |
| 334 | 212418_at | −1 | 0.7882 | 1997 | 464 |
| 335 | 212038_s_at | −1 | 2.2340 | 7416 | 465 |
| 336 | 203142_s_at | −1 | 0.5976 | 8546 | 466 |
| 337 | 201078_at | −1 | 1.5492 | 9375 | 467 |
| 338 | 202979_s_at | −1 | −0.0674 | 58487 | 468 |
| 339 | 209330_s_at | −1 | 1.4640 | 3184 | 469 |
| 340 | 218578_at | −1 | 0.0056 | 79577 | 470 |
| 341 | 209861_s_at | −1 | 1.0650 | 10988 | 471 |
| 342 | 200991_s_at | −1 | 1.0796 | 9784 | 472 |
| 343 | 202675_at | −1 | 1.2146 | 6390 | 473 |
| 344 | 218570_at | −1 | 0.2103 | 114971 | 474 |
| 345 | 208944_at | −1 | 2.1295 | 7048 | 475 |
| 346 | 200071_at | −1 | 1.0260 | 10285 | 476 |
| 347 | 211676_s_at | −1 | 0.7779 | 3459 | 477 |
| 348 | 203776_at | −1 | 0.3872 | 27238 | 478 |
| 349 | 221381_s_at | −1 | 1.1420 | 10933 | 479 |
| 350 | 209112_at | −1 | 1.4732 | 1027 | 480 |
| 351 | 209310_s_at | −1 | 0.7831 | 837 | 481 |
| 352 | 203261_at | −1 | 1.7458 | 10671 | 482 |
| 353 | 208860_s_at | −1 | −0.4157 | 546 | 483 |
| 354 | 206174_s_at | −1 | 0.8336 | 5537 | 484 |
| 355 | 212168_at | −1 | 0.5727 | 10137 | 485 |
| 356 | 201529_s_at | −1 | 0.6302 | 6117 | 486 |
| 357 | 212438_at | −1 | 0.3453 | 11017 | 487 |
| 358 | 212544_at | −1 | 1.0899 | 9326 | 488 |
| 359 | 203689_s_at | −1 | 1.1102 | 2332 | 489 |
| 360 | 201179_s_at | −1 | 0.2789 | 2773 | 490 |
| 361 | 208857_s_at | −1 | 1.1374 | 5110 | 491 |
| 362 | 203138_at | −1 | 0.5301 | 8520 | 492 |
| 363 | 202799_at | −1 | 1.0538 | 8192 | 493 |
| 364 | 218519_at | −1 | 0.0973 | 55032 | 494 |
| 365 | 218486_at | −1 | 0.8606 | 8462 | 495 |
| 366 | 203758_at | −1 | 1.9611 | 1519 | 496 |
| 367 | 211967_at | −1 | 2.2047 | 114908 | 497 |
| 368 | 208029_s_at | −1 | 0.5497 | 55353 | 498 |
| 369 | 201408_at | −1 | 1.3267 | 5500 | 499 |
| 370 | 218395_at | −1 | 0.8451 | 64431 | 500 |
| 371 | 200973_s_at | −1 | 0.0428 | 10099 | 501 |
| 372 | 200983_x_at | −1 | 2.2568 | 966 | 502 |
| 373 | 204045_at | −1 | 0.6250 | 9338 | 503 |
| 374 | 211985_s_at | −1 | 1.4396 | 801 | 504 |
| 375 | 213882_at | −1 | −0.5182 | 83941 | 505 |
| 376 | 205084_at | −1 | 0.1770 | 55973 | 506 |
| 377 | 200777_s_at | −1 | 2.5773 | 9689 | 507 |
| 378 | 213883_s_at | −1 | 1.3376 | 83941 | 508 |
| 379 | 212536_at | −1 | 0.9452 | 23200 | 509 |
| 380 | 212515_s_at | −1 | 0.9260 | 1654 | 510 |
| 381 | 200628_s_at | −1 | 0.7853 | 7453 | 511 |
| 382 | 213405_at | −1 | 0.5778 | 57403 | 512 |
| 383 | 209296_at | −1 | 1.3937 | 5495 | 513 |
| 384 | 218229_s_at | −1 | 0.8658 | 57645 | 514 |
| 385 | 218946_at | −1 | 1.8086 | 27247 | 515 |
| 386 | 202823_at | −1 | 0.9882 | 6921 | 516 |
| 387 | 208666_s_at | −1 | 0.5861 | 6767 | 517 |
| 388 | 201689_s_at | −1 | −0.0148 | 7163 | 518 |
| 389 | 201716_at | −1 | 0.8628 | 6642 | 519 |
| 390 | 218137_s_at | −1 | 0.8201 | 60682 | 520 |
| 391 | 200054_at | −1 | 0.4418 | 8882 | 521 |
| 392 | 208638_at | −1 | 2.6546 | 10130 | 522 |
| 393 | 206542_s_at | −1 | 1.1986 | 6595 | 523 |
| 394 | 209208_at | −1 | −0.2471 | 9526 | 524 |
| 395 | 218185_s_at | −1 | 0.6604 | 55156 | 525 |
| 396 | 209300_s_at | −1 | 0.3792 | 25977 | 526 |
| 397 | 214531_s_at | −1 | 0.5117 | 6642 | 527 |
| 398 | 209027_s_at | −1 | 0.6943 | 10006 | 528 |
| 399 | 200876_s_at | −1 | 2.7394 | 5689 | 529 |
| 400 | 221808_at | −1 | 1.2999 | 9367 | 530 |
| 401 | 200812_at | −1 | 1.8392 | 10574 | 531 |
| 402 | 217898_at | −1 | 2.4200 | 56851 | 532 |
| 403 | 213404_s_at | −1 | 1.7281 | 6009 | 533 |
| 404 | 217313_at | −1 | 1.0846 | — | 534 |
| 405 | 208852_s_at | −1 | 1.5732 | 821 | 535 |
| 406 | 205961_s_at | −1 | 0.3967 | 11168 | 536 |
| 407 | 218408_at | −1 | 0.7486 | 26519 | 537 |
| 408 | 202978_s_at | −1 | 0.0798 | 58487 | 538 |
| 409 | 214812_s_at | −1 | 2.4679 | 55233 | 539 |
| 410 | 212878_s_at | −1 | 0.1008 | 3831 | 540 |
| 411 | 202119_s_at | −1 | 2.0419 | 8895 | 541 |
| 412 | 209387_s_at | −1 | 0.3916 | 4071 | 542 |
| 413 | 209440_at | −1 | 2.0282 | 5631 | 543 |
| 414 | 220985_s_at | −1 | 0.4970 | 81790 | 544 |
| 415 | 218172_s_at | −1 | 0.4654 | 79139 | 545 |
| 416 | 203284_s_at | −1 | 0.6826 | 9653 | 546 |
| 417 | 202163_s_at | −1 | 0.3248 | 9337 | 547 |
| 418 | 216483_s_at | −1 | 0.6811 | 56005 | 548 |
| 419 | 212887_at | −1 | 1.2028 | 10484 | 549 |
| 420 | 206989_s_at | −1 | 1.7013 | 9169 | 550 |
| 421 | 217725_x_at | −1 | 1.4834 | 26135 | 551 |
| 422 | 202314_at | −1 | 0.2208 | 1595 | 552 |
| 423 | 202680_at | −1 | 0.3848 | 2961 | 553 |
| 424 | 217843_s_at | −1 | 1.1394 | 29079 | 554 |
| 425 | 209025_s_at | −1 | 0.9337 | 10492 | 555 |
| 426 | 200668_s_at | −1 | 2.8886 | 7323 | 556 |
| 427 | 210691_s_at | −1 | 0.4321 | 27101 | 557 |
| 428 | 201472_at | −1 | 1.6450 | 7411 | 558 |
| 429 | 212956_at | −1 | 0.8992 | 23158 | 559 |
| 430 | 220926_s_at | −1 | 0.1949 | 80267 | 560 |
| 431 | 219356_s_at | −1 | 1.6198 | 51510 | 561 |
| 432 | 201511_at | −1 | 0.8429 | 14 | 562 |
| 433 | 212453_at | −1 | 1.5109 | 26128 | 563 |
| 434 | 212440_at | −1 | 1.7380 | 11017 | 564 |
| 435 | 218236_s_at | −1 | 0.8765 | 23683 | 565 |
| 436 | 201515_s_at | −1 | 2.1329 | 7247 | 566 |
| 437 | 201858_s_at | −1 | 1.1537 | 5552 | 567 |
| 438 | 212250_at | −1 | 1.6486 | 92140 | 568 |
| 439 | 217900_at | −1 | 2.1840 | 55699 | 569 |
| 440 | 217989_at | −1 | 1.7563 | 51170 | 570 |
| 441 | 210250_x_at | −1 | 1.3997 | 158 | 571 |
| 442 | 218761_at | −1 | 1.1344 | 54778 | 572 |
| 443 | 203053_at | −1 | 1.5515 | 10286 | 573 |
| 444 | 203721_s_at | −1 | 1.2257 | 51096 | 574 |
| 445 | 212989_at | −1 | 0.3137 | 259230 | 575 |
| 446 | 201847_at | −1 | 2.1432 | 3988 | 576 |
| 447 | 203983_at | −1 | 1.0034 | 7257 | 577 |
| 448 | 221761_at | −1 | 0.5938 | 159 | 578 |
| 449 | 203302_at | −1 | 0.3182 | 1633 | 579 |
| 450 | 212112_s_at | −1 | 1.9386 | 23673 | 580 |
| 451 | 210283_x_at | −1 | 1.2625 | 10605 | 581 |
| 452 | 217987_at | −1 | 1.4309 | 54529 | 582 |
| 453 | 218118_s_at | −1 | 0.6889 | 10431 | 583 |
| 454 | 202832_at | −1 | 1.3710 | 9648 | 584 |

“No.” refers to gene numbers of Table 10 as mentioned herein. “ProbeSetID” refers to the identification number on the Affymetrix gene chip HT_HG-U133A. “S” refers to “side”. The “side” defines whether a gene has to be over- or underexpressed for state B according to the model described in the Example section under “3. Identification of RCC specific gene sets”. The value “1” indicates an overexpression and the value “−1” indicates underexpression. “T*” refers to “threshold” and describes the value which used as control to decide on overexpression or underexpression. It corresponds to threshold θ_{g} in equation (3) of example 3, “Entrez” describes the Entrez Genbank accession number. “SEQ” refers to the SEQ ID No..

TABLE 11

| No | ProbeSet ID | S | T* | Entrez | SEQ |
|---|---|---|---|---|---|
| 1 | 203744_at | 1 | 0.4538 | 3149 | 585 |
| 2 | 208699_x_at | 1 | 2.1223 | 7086 | 586 |
| 3 | 218847_at | 1 | 0.7209 | 10644 | 587 |
| 4 | 203355_s_at | 1 | 0.1877 | 23362 | 588 |
| 5 | 213009_s_at | 1 | 1.3696 | 4591 | 589 |
| 6 | 219874_at | 1 | −0.3138 | 84561 | 590 |
| 7 | 218412_s_at | 1 | 1.9539 | 9569 | 591 |
| 8 | 214039_s_at | 1 | 3.7728 | 55353 | 592 |
| 9 | 208905_at | 1 | 3.8095 | 54205 | 593 |
| 10 | 201870_at | 1 | 1.2113 | 10953 | 594 |
| 11 | 34764_at | 1 | 0.3539 | 23395 | 595 |
| 12 | 212186_at | 1 | 1.2865 | 31 | 596 |
| 13 | 218526_s_at | 1 | 1.4536 | 29098 | 597 |
| 14 | 202515_at | 1 | 2.3460 | 1739 | 598 |
| 15 | 222056_s_at | 1 | 1.1711 | 51011 | 599 |
| 16 | 217852_s_at | 1 | 3.1994 | 55207 | 600 |
| 17 | 222165_x_at | 1 | 0.2755 | 79095 | 601 |
| 18 | 221196_x_at | 1 | 0.7029 | 79184 | 602 |
| 19 | 206836_at | −1 | 2.3095 | 6531 | 603 |
| 20 | 208712_at | −1 | 2.9253 | 595 | 604 |
| 21 | 221747_at | −1 | 2.6506 | 7145 | 605 |
| 22 | 208711_s_at | −1 | 3.0413 | 595 | 606 |
| 23 | 218864_at | −1 | 0.6244 | 7145 | 607 |
| 24 | 205247_at | −1 | 0.9875 | 4855 | 608 |
| 25 | 219232_s_at | −1 | 2.6881 | 112399 | 609 |
| 26 | 222033_s_at | −1 | 2.7751 | 2321 | 610 |
| 27 | 205902_at | −1 | −0.5815 | 3782 | 611 |
| 28 | 208981_at | −1 | 2.8818 | 5175 | 612 |
| 29 | 204468_s_at | −1 | 0.3388 | 7075 | 613 |
| 30 | 218995_s_at | −1 | 0.6571 | 1906 | 614 |
| 31 | 221529_s_at | −1 | 2.6064 | 83483 | 615 |
| 32 | 202112_at | −1 | 3.0937 | 7450 | 616 |
| 33 | 212171_x_at | −1 | 3.1837 | 7422 | 617 |
| 34 | 210513_s_at | −1 | 2.6802 | 7422 | 618 |
| 35 | 204736_s_at | −1 | −0.0441 | 1464 | 619 |
| 36 | 215244_at | −1 | 0.1464 | 26220 | 620 |
| 37 | 204726_at | −1 | 0.7609 | 1012 | 621 |
| 38 | 221009_s_at | −1 | 2.4870 | 51129 | 622 |
| 39 | 209652_s_at | −1 | 0.3797 | 5228 | 623 |
| 40 | 221794_at | −1 | 1.0626 | 57572 | 624 |
| 41 | 219134_at | −1 | 2.1160 | 64123 | 625 |
| 42 | 204677_at | −1 | 2.2375 | 1003 | 626 |
| 43 | 221031_s_at | −1 | 1.6851 | 81575 | 627 |
| 44 | 205073_at | −1 | 1.7351 | 1573 | 628 |
| 45 | 209071_s_at | −1 | 4.2320 | 8490 | 629 |
| 46 | 210287_s_at | −1 | −0.8701 | 2321 | 630 |
| 47 | 203934_at | −1 | 2.2038 | 3791 | 631 |
| 48 | 210869_s_at | −1 | 3.0257 | 4162 | 632 |
| 49 | 214297_at | −1 | −0.6537 | 1464 | 633 |
| 50 | 206481_s_at | −1 | 1.9796 | 9079 | 634 |
| 51 | 206236_at | −1 | −0.0285 | 2828 | 635 |
| 52 | 205507_at | −1 | 0.4425 | 22899 | 636 |
| 53 | 218484_at | −1 | 1.9968 | 56901 | 637 |
| 54 | 219656_at | −1 | 0.8195 | 51294 | 638 |
| 55 | 218353_at | −1 | 4.3356 | 8490 | 639 |
| 56 | 218950_at | −1 | 0.6994 | 64411 | 640 |
| 57 | 208982_at | −1 | 3.2519 | 5175 | 641 |
| 58 | 209784_s_at | −1 | 0.8851 | 3714 | 642 |
| 59 | 203421_at | −1 | −0.1158 | 9537 | 643 |
| 60 | 208394_x_at | −1 | 2.5754 | 11082 | 644 |
| 61 | 211626_x_at | −1 | 1.1110 | 2078 | 645 |
| 62 | 211527_x_at | −1 | 2.4324 | 7422 | 646 |
| 63 | 209439_s_at | −1 | 1.7810 | 5256 | 647 |
| 64 | 209086_x_at | −1 | 1.6992 | 4162 | 648 |
| 65 | 213075_at | −1 | 1.9951 | 169611 | 649 |
| 66 | 218723_s_at | −1 | 2.6944 | 28984 | 650 |
| 67 | 221489_s_at | −1 | 1.5033 | 81848 | 651 |
| 68 | 209070_s_at | −1 | 3.0697 | 8490 | 652 |
| 69 | 213792_s_at | −1 | 2.9646 | 3643 | 653 |
| 70 | 218825_at | −1 | 0.4534 | 51162 | 654 |
| 71 | 40687_at | −1 | 1.7953 | 2701 | 655 |
| 72 | 221123_x_at | −1 | 2.2593 | 55893 | 656 |
| 73 | 55583_at | −1 | 0.8311 | 57572 | 657 |
| 74 | 214438_at | −1 | 0.3285 | 3142 | 658 |
| 75 | 205656_at | −1 | 2.0638 | 27253 | 659 |
| 76 | 205572_at | −1 | 1.2492 | 285 | 660 |
| 77 | 206271_at | −1 | 1.7322 | 7098 | 661 |
| 78 | 218149_s_at | −1 | 2.9141 | 55893 | 662 |
| 79 | 211266_s_at | −1 | −0.6392 | 2828 | 663 |
| 80 | 205903_s_at | −1 | −1.5187 | 3782 | 664 |
| 81 | 32137_at | −1 | 0.9339 | 3714 | 665 |
| 82 | 204642_at | −1 | 1.3247 | 1901 | 666 |
| 83 | 44783_s_at | −1 | 1.7356 | 23462 | 667 |
| 84 | 207414_s_at | −1 | 0.0035 | 5046 | 668 |
| 85 | 213030_s_at | −1 | 0.3669 | 5362 | 669 |
| 86 | 205199_at | −1 | 1.5983 | 768 | 670 |
| 87 | 202479_s_at | −1 | 1.4550 | 28951 | 671 |
| 88 | 202878_s_at | −1 | 2.8315 | 22918 | 672 |
| 89 | 218804_at | −1 | −0.1414 | 55107 | 673 |
| 90 | 209543_s_at | −1 | 2.1103 | 947 | 674 |
| 91 | 219091_s_at | −1 | 2.1372 | 79812 | 675 |
| 92 | 209200_at | −1 | 1.5685 | 4208 | 676 |
| 93 | 201578_at | −1 | 2.5705 | 5420 | 677 |
| 94 | 204464_s_at | −1 | 1.5208 | 1909 | 678 |
| 95 | 210512_s_at | −1 | 4.3501 | 7422 | 679 |
| 96 | 206995_x_at | −1 | 0.5703 | 8578 | 680 |
| 97 | 52255_s_at | −1 | −0.0854 | 50509 | 681 |
| 98 | 219315_s_at | −1 | 2.0402 | 79652 | 682 |
| 99 | 210078_s_at | −1 | 0.1896 | 7881 | 683 |
| 100 | 218731_s_at | −1 | 2.3146 | 64856 | 684 |
| 101 | 212382_at | −1 | 1.9947 | 6925 | 685 |
| 102 | 212977_at | −1 | 1.7593 | 57007 | 686 |
| 103 | 215104_at | −1 | −0.3730 | 83714 | 687 |
| 104 | 212793_at | −1 | 0.1560 | 23500 | 688 |
| 105 | 206814_at | −1 | −0.1826 | 4803 | 689 |
| 106 | 201655_s_at | −1 | 2.4592 | 3339 | 690 |
| 107 | 200878_at | −1 | 4.2720 | 2034 | 691 |
| 108 | 203438_at | −1 | 1.1001 | 8614 | 692 |
| 109 | 203238_s_at | −1 | 3.3351 | 4854 | 693 |
| 110 | 212538_at | −1 | 1.4583 | 23348 | 694 |
| 111 | 213349_at | −1 | 2.0507 | 23023 | 695 |
| 112 | 212758_s_at | −1 | 1.7063 | 6935 | 696 |
| 113 | 204904_at | −1 | 1.5891 | 2701 | 697 |
| 114 | 208851_s_at | −1 | 1.9715 | 7070 | 698 |
| 115 | 221814_at | −1 | 1.0068 | 25960 | 699 |
| 116 | 213541_s_at | −1 | 0.5653 | 2078 | 700 |
| 117 | 219821_s_at | −1 | −0.0525 | 54438 | 701 |
| 118 | 218507_at | −1 | 3.3707 | 29923 | 702 |
| 119 | 204200_s_at | −1 | 0.5029 | 5155 | 703 |
| 120 | 218839_at | −1 | 0.8679 | 23462 | 704 |
| 121 | 221748_s_at | −1 | 3.7428 | 7145 | 705 |
| 122 | 222079_at | −1 | −0.8229 | 2078 | 706 |
| 123 | 201328_at | −1 | 1.9460 | 2114 | 707 |
| 124 | 201041_s_at | −1 | 4.0892 | 1843 | 708 |
| 125 | 212951_at | −1 | 2.1755 | 221395 | 709 |
| 126 | 202478_at | −1 | 1.6323 | 28951 | 710 |
| 127 | 211148_s_at | −1 | 0.0334 | 285 | 711 |
| 128 | 207290_at | −1 | −1.5986 | 5362 | 712 |
| 129 | 47550_at | −1 | 0.6652 | 11178 | 713 |
| 130 | 38918_at | −1 | 0.2916 | 9580 | 714 |
| 131 | 212387_at | −1 | 2.0779 | 6925 | 715 |
| 132 | 205846_at | −1 | 0.5781 | 5787 | 716 |
| 133 | 209183_s_at | −1 | 2.8982 | 11067 | 717 |
| 134 | 203753_at | −1 | 2.4717 | 6925 | 718 |
| 135 | 204463_s_at | −1 | 0.4644 | 1909 | 719 |
| 136 | 205326_at | −1 | 0.9484 | 10268 | 720 |
| 137 | 209199_s_at | −1 | 1.7644 | 4208 | 721 |
| 138 | 212386_at | −1 | 2.8700 | 6925 | 722 |
| 139 | 219619_at | −1 | 0.8413 | 54769 | 723 |
| 140 | 218660_at | −1 | 2.1403 | 8291 | 724 |
| 141 | 201624_at | −1 | 2.7292 | 1615 | 725 |
| 142 | 218975_at | −1 | −0.5101 | 50509 | 726 |
| 143 | 219700_at | −1 | 0.4445 | 57125 | 727 |
| 144 | 213891_s_at | −1 | 2.3933 | 6925 | 728 |
| 145 | 201809_s_at | −1 | 2.5137 | 2022 | 729 |
| 146 | 202877_s_at | −1 | 1.9466 | 22918 | 730 |
| 147 | 205935_at | −1 | −0.3196 | 2294 | 731 |
| 148 | 203063_at | −1 | 0.4574 | 9647 | 732 |
| 149 | 217844_at | −1 | 2.5577 | 58190 | 733 |
| 150 | 200632_s_at | −1 | 4.0630 | 10397 | 734 |
| 151 | 201365_at | −1 | 1.9308 | 4947 | 735 |
| 152 | 220027_s_at | −1 | 1.1731 | 54922 | 736 |
| 153 | 222146_s_at | −1 | 2.3658 | 6925 | 737 |
| 154 | 200904_at | −1 | 3.7534 | 3133 | 738 |
| 155 | 41856_at | −1 | 0.3849 | 219699 | 739 |
| 156 | 207560_at | −1 | 0.4660 | 9154 | 740 |
| 157 | 220335_x_at | −1 | 0.9676 | 23491 | 741 |
| 158 | 218876_at | −1 | 0.3678 | 51673 | 742 |
| 159 | 219777_at | −1 | 2.1049 | 474344 | 743 |
| 160 | 205341_at | −1 | −0.9784 | 30846 | 744 |
| 161 | 212813_at | −1 | 2.0963 | 83700 | 745 |
| 162 | 219761_at | −1 | 0.1239 | 51267 | 746 |
| 163 | 209438_at | −1 | 1.2005 | 5256 | 747 |
| 164 | 212730_at | −1 | 1.0922 | 23336 | 748 |
| 165 | 214265_at | −1 | 0.3480 | 8516 | 749 |
| 166 | 204134_at | −1 | 0.8627 | 5138 | 750 |
| 167 | 200795_at | −1 | 3.4708 | 8404 | 751 |
| 168 | 218892_at | −1 | −1.2529 | 8642 | 752 |
| 169 | 202912_at | −1 | 3.5054 | 133 | 753 |
| 170 | 221870_at | −1 | 2.5560 | 30846 | 754 |
| 171 | 212599_at | −1 | 2.5884 | 26053 | 755 |
| 172 | 208850_s_at | −1 | 1.5384 | 7070 | 756 |
| 173 | 206477_s_at | −1 | −1.2220 | 4858 | 757 |
| 174 | 45297_at | −1 | 1.2774 | 30846 | 758 |
| 175 | 201150_s_at | −1 | 2.9579 | 7078 | 759 |
| 176 | 38671_at | −1 | 1.8357 | 23129 | 760 |
| 177 | 218656_s_at | −1 | 2.0210 | 10186 | 761 |
| 178 | 212552_at | −1 | 3.2921 | 3241 | 762 |
| 179 | 213869_x_at | −1 | 2.4380 | 7070 | 763 |
| 180 | 219602_s_at | −1 | 0.1530 | 63895 | 764 |
| 181 | 208983_s_at | −1 | 1.1928 | 5175 | 765 |
| 182 | 212235_at | −1 | 2.0713 | 23129 | 766 |
| 183 | 205801_s_at | −1 | 1.0815 | 25780 | 767 |
| 184 | 219719_at | −1 | −0.9314 | 51751 | 768 |
| 185 | 204220_at | −1 | 1.6400 | 9535 | 769 |
| 186 | 212494_at | −1 | 1.3189 | 23371 | 770 |
| 187 | 220471_s_at | −1 | −0.7667 | 80177 | 771 |
| 188 | 336_at | −1 | −0.5174 | 6915 | 772 |
| 189 | 211340_s_at | −1 | 2.6655 | 4162 | 773 |
| 190 | 222101_s_at | −1 | 1.1035 | 8642 | 774 |
| 191 | 220507_s_at | −1 | 0.3747 | 51733 | 775 |
| 192 | 203439_s_at | −1 | 0.3593 | 8614 | 776 |
| 193 | 212226_s_at | −1 | 3.8913 | 8613 | 777 |
| 194 | 218805_at | −1 | 1.8552 | 55340 | 778 |
| 195 | 64064_at | −1 | 1.6477 | 55340 | 779 |

“No.” refers to gene numbers of Table 10 as mentioned herein. “ProbeSetID” refers to the identification number on the Affymetrix gene chip HT_HG-U133A. “S” refers to “side”. The “side” defines whether a gene has to be over- or underexpressed in state C according to the model described in the Example section under “3. Identification of RCC specific gene sets”. The value “1” indicates an overexpression and the value “−1” indicates underexpression. “T*” refers to “threshold” and describes the value which used as control to decide on overexpression or underexpression. It corresponds to threshold θ_{g} in equation (3) of example 3. “Entrez” describes the Entrez Genbank accession number. “SEQ” refers to the SEQ ID No..

[0565] The following publications were considered in the context of the invention:
[0566] 1. D. Hanahan, R. A. Weinberg, Cell 100, 57 (2000).
[0567] 2. M. Baudis, M. L. Cleary, Bioinformatics 17, 1228 (2001).
[0568] 3. L. J. Engle, C. L. Simpson, J. E. Landers, Oncogene 25, 1594 (2006).
[0569] 4. R. Beroukhim et al., Cancer Res 69, 4674 (2009).
[0570] 5. R. Beroukhim et al., Nature 463, 899 (2010).
[0571] 6. R. S. Huang, M. E. Dolan, Pharmacogenomics 11, 471 (2010).
[0572] 7. J. L. Huret, S. Senon, A. Bernheim, P. Dessen, Cell Mol Biol (Noisy-le-grand) 50, 805 (2004).
[0573] 8. M. Baudis, BMC Cancer 7, 226 (2007).
[0574] 9. F. Forozan, R. Karhu, J. Kononen, A. Kallioniemi, O. P. Kallioniemi, Trends in Genetics 13, 405 (1997).
[0575] 10. T. Hruz et al., Adv Bioinformatics 2008, 420747 (2008).
[0576] 11. P. Zimmermann, L. Hennig, W. Gruissem, Trends Plant Sci 10, 407 (2005).
[0577] 12. V. G. Tusher, R. Tibshirani, G. Chu, Proc Natl Acad Sci USA 98, 5116 (2001).
[0578] 13. G. M. Poage et al., PLoS One 5, e9651 (2010).
[0579] 14. W. Thoenes, S. Storkel, H. J. Rumpelt, Pathol Res Pract 181, 125 (1986).
[0580] 15. J. N. Eble, G. Sauter, E. J. I., I. A. E. Sesterhenn, World Health Organization Classification of Tumours. Pathology and Genetics of Tumours of the Urinary System and Male Genital Organs. (IARC Press, Lyon, 2004).
[0581] 16. H. Bengtsson, P. Wirapati, T. P. Speed, Bioinformatics 25, 2149 (2009).
[0582] 17. H. Bengtsson, A. Ray, P. Spellman, T. P. Speed, Bioinformatics 25, 861 (2009).
[0583] 18. E. S. Venkatraman, A. B. Olshen, Bioinformatics 23, 657 (2007).
[0584] 19. A. J. Iafrate et al., Nat Genet 36, 949 (2004).
[0585] 20. P. D. Thomas et al., Genome Res 13, 2129 (2003).
[0586] 21. H. Mi et al., Nucleic Acids Res 33, D284 (2005).
[0587] 22. R. C. Gentleman et al., Genome Biol 5, R80 (2004).
[0588] 23. A. I. Saeed et al., Methods Enzymol 411, 134 (2006).
[0589] 24. J. Kononen et al., Nat Med 4, 844 (1998).
[0590] 25. M. A. Rubin, R. Dunn, M. Strawderman, K. J. Pienta, Am J Surg Pathol 26, 312 (2002).
[0591] 26. P. Schraml et al., J Pathol 196, 186 (2002).
[0592] 27. Cheng Li and Wing Hung Wong, Proc. Natl. Acad. Sci. Vol. 98, 31-36 (2001a).
[0593] 28. Cheng Li and Wing Hung Wong, Genome Biology 2(8) (2001b).
[0594] 29. [dChip] dChip Software, available at http://www.dchip.org.
[0595] 30. Tusher V G, Tibshirani R, Chu G., Proc Natl Acad Sci USA/98(9): 5116-5121 (2001).
[0596] 31. T. Martinetz and K. Schulten. A, Artificial Neural Networks, I:397-402, (1991).
[0597] 32. hanging Fan, Irene Gijbels: Local Polynomial Modelling and Its Applications. Chapman and Hall/CRC, 1996, ISBN 978-0412983214.
[0598] 33. Clarke, R., Ressom, H. W., Wang, A., Xuan, J., Liu, M. C., Gehan, E. A., & Wang, Y., Nature Reviews Cancer, 8(1), 37-49, (2008).
[0599] 34. Gene Expression Omnibus: http://www.ncbi.nlm.nih.gov/geo/35.
[0600] 35. Gregory Shakhnarovich, Trevor Darrell, Piotr Indyk: Nearest-neighbor methods in learning and vision. MIT Press, 2005, ISBN 026219547X

1. A method of diagnosing, prognosing, stratifying and/or screening renal cell carcinoma (RCC) in at least one human or animal patient suspected of being afflicted with RCC comprising the steps of:
(a) providing a sample of a human or animal individual suspected to suffer from RCC;
(b) testing the sample for a signature indicative of a discrete RCC-specific state by determining expression of at least 6 genes of Table 10; and
(c) allocating a discrete RCC-specific state to the sample based on the signature determined in step (b).

2. A method of determining the responsiveness of at least one human or animal individual suspected of being afflicted with RCC towards a pharmaceutically active agent comprising the steps of:
(a) providing a sample of a human or animal individual suspected to suffer from RCC before the pharmaceutically active agent is administered;
(b) testing the sample for a signature indicative of a discrete RCC-specific state by determining expression of at least 6 genes of Table 10;
(c) allocating a discrete RCC-specific state to the sample based on the signature determined in step (b);
(d) determining the effects of the pharmaceutically active agent on the disease symptoms in the individual; and
(e) identifying a correlation between the effects on disease symptoms and/or discrete RCC-specific states and the initial discrete RCC-specific state of the sample.

3. A method of predicting the responsiveness of at least one patient suspected of being afflicted with RCC towards a pharmaceutically active agent comprising the steps of:
(a) determining whether a correlation exists between effects on disease symptoms and/or discrete RCC-specific states and the initial discrete RCC-specific state as a consequence of administration of a pharmaceutically active agent by using the method of claim 2;
(b) testing a sample of a human or animal individual patient suspected of being afflicted with RCC for a signature indicative of a discrete RCC-specific state by determining expression of at least 6 genes of Table 10;
(c) allocating a discrete and a discrete RCC specific state-specific state to said sample based on the signature determined in step (c);
(d) comparing the discrete and a discrete RCC specific state-specific state of the sample in step (c) vs. the discrete and a discrete RCC specific state-specific state for which a correlation has been determined in step (a); and
(e) predicting the effect of a pharmaceutically active compound on the disease symptoms in the patient.

4. A method of determining the effects of a potential pharmaceutically active compound for treatment of RCC, comprising the steps of:
(a) providing a sample of a human or animal individual suspected to suffer from RCC before a pharmaceutically active agent is applied;
(b) testing the sample from step (a) for a signature indicative of a discrete RCC-specific state by determining expression of at least 6 genes of Table 10;
(c) allocating a discrete RCC-specific state to the sample from step (a) based on the signature determined in step (b);
(d) providing a sample of the same human or animal individual suspected to suffer from RCC after a pharmaceutically active agent is applied;
(e) testing the sample from step (d) for a signature indicative of a discrete RCC-specific state by determining expression of at least 6 genes of Table 10;
(f) allocating a discrete RCC-specific state to the sample from step (d) based on the signature determined in step (e); and
(g) comparing the discrete RCC-specific states identified in steps (c) and (f).

5. The method of claim 1, wherein the signature is characterized by the expression pattern of at least 10 genes of Table 10 with genes 1 to 286 of Table 10 being overexpressed and genes 287 to 454 of Table 10 being underexpressed.

6. The method of claim 1, wherein the signature is characterized by the expression pattern of at least 10 genes of Table 10 with genes 1 to 286 of Table 10 being underexpressed and genes 287 to 454 of Table 10 being overexpressed.

7. The method of claim 6, wherein the signature can be further subdivided by determining expression of at least 6 genes of Table 11.

8. The method of claim 7, wherein the signature is characterized by the expression pattern of at least 10 genes of Table 11 with genes 1 to 19 of Table 11 being overexpressed and genes 20 to 195 of Table 11 being underexpressed.

9. The method of claim 7, wherein the signature is characterized by the expression pattern of at least 10 genes of Table 11 with genes 1 to 19 of Table 11 being underexpressed and genes 20 to 195 of Table 11 being overexpressed.

10. A signature which is defined by the expression pattern of at least 6 genes of Table 10 for use in diagnosing, prognosing, stratifying and/or screening renal cell cancer in human or animal individuals.

11. A signature which is defined by the expression pattern of at least 6 genes of Table 10 for use as a read out of a target for development, identification and/or screening of at least one pharmaceutically active compound for treatment of renal cell cancer.

12. The signature for use according to claim 10, which is defined by the expression pattern of at least 6 genes of Table 10 with genes 1 to 286 of Table 10 being overexpressed and genes 287 to 454 of Table 10 being underexpressed.

13. The signature for use according to claim 10, which is defined by the expression pattern of at least 6 genes of Table 10 with genes 1 to 286 of Table 10 being underexpressed and genes 287 to 454 of Table 10 being overexpressed, and which is further defined by the expression pattern of at least 6 genes of Table 11.

14. The signature for use according to claim 13, wherein genes 1 to 19 of Table 11 are overexpressed and genes 20 to 195 of Table 11 are underexpressed.

15. The signature for use according to claim 13, wherein genes 1 to 19 of Table 11 are underexpressed and genes 20 to 195 of Table 11 are overexpressed.

The application's sequence listing, which the Patent Office published only in electronic form, follows.

SEQUENCE LISTING (785 sequences)

SEQ ID NO: 1 - DNA, 4219 bp, Homo sapiens
gcagttgcccacagacccggaagtggatcgtgcggagcaagcatcacaccatggcgtatgagtgttcctctgtgtagactcaacctgcgcctcgccgtcccccattcgcacacccgatgcccgggggtcgctacggacttaaaatctccgcaccgcaccctccacctcagaaacgttcctggatccgaacactgccccctgacgacctagagagatcccggctcccagcccactgagtggcttcagcctcgctggaagaagtctggaagaagaggaagaggaaagaaaaggagtcagggatggcccttactcaggtacggttgacatttagggatgtggccatagaattctctcaggaggagtggaaatgcctggaccctgctcagaggatcttatacagggacgtgatgttggagaactactggaaccttgtttctctgggactgtgtcattttgatatgaatattatctccatgttggaggaagggaaagagccctggactgtgaagagctgtgtgaaaatagcaagaaaaccaagaacgccggaatgtgtcaaaggcgtggtcacagatatccctcctaaatgtacaatcaaggatttgctaccaaaagagaagagcagtacagaagcagtattccacacagtggtgttggaaagacacgaaagccctgacattgaagacttttccttcaaggaaccccagaaaaatgtgcatgattttgagtgtcaatggagagatgacacaggaaattacaagggagtgcttatggcccagaaagaaggtaaaagagatcaacgcgacagaagagacatagaaaacaagcttatgaacaatcagcttggagtaagctttcattctcatctgcctgaactgcagctatttcaaggtgaggggaaaatgtatgaatgtaatcaagttgagaagtctaccaacaatggttcctcagtgtcaccacttcaacaaattccttctagtgtccaaacccacaggtctaaaaaatatcatgaacttaaccatttttcattactcacacaaagacgaaaagcaaacagttgtggaaaaccttataaatgtaatgaatgtggcaaggcgttcactcagaattcgaaccttacaagtcataggagaattcatagtggagagaagccttacaaatgcagtgagtgcggcaaaacctttactgttcgttcaaatctaactattcatcaggtcatccatactggagaaaaaccttacaaatgtcatgagtgtggcaaggtcttcaggcacaattcataccttgcaactcatcggcgaattcatactggagagaaaccttacaagtgtaatgagtgtggaaaagcctttagaggacattcaaacctaactacccatcagttaattcatactggagaaaaaccgttcaaatgtaatgaatgtggcaagctcttcactcaaaattcacaccttataagtcattggagaattcacactggagagaaaccttacaagtgcaatgagtgcggcaaagcctttagtgttcgttcaagcctagcaatccatcagacaatccacactggagaaaaaccttacaaatgtaatgaatgtggcaaagtctttaggtacaattcatacctcggaaggcatcggagagttcatactggtgagaaaccttacaagtgtaatgaatgtggcaaagccttcagtatgcattcaaacctagctacccatcaggtcatccatactggaacaaaacctttcaaatgcaatgaatgcagcaaggttttcactcaaaattcacaacttgcaaatcatcgaagaattcatactggagagaaaccttacaagtgtaatgagtgtgggaaagccttcagtgttcgttcaagtctgactacccatcaggcaatccattctggagagaaaccttacaaatgtattgaatgtggcaagagcttcactcaaaaatcacaccttagaagtcatcggggaattcattctggagagaaaccttacaagtgtaatgaatgtggtaaagtcttcgctcaaacatcacaacttgcaaggcattggagagttcatactggagaaaaaccttacaagtgtaatgactgtggcagagcctttagtgatcgttcaagcctaacttttcatcaggcaatacatactggagagaaaccttacaaatgtcatgaatgcggcaaggtttttaggcacaattcataccttgcaactcatcggcgaattcatactggagagaaaccttacaagtgtaatgagtgtgggaaagcctttagtatgcattcaaacctaactacccataaggtcatccatactggagagaagccttacaaatgtaatcaatgtggcaaggtcttcactcagaactcacaccttgcaaatcatcaaaggactcacaccggagagaaaccttaccgatgcaatgagtgtgggaaagccttcagtgttcgttcaagcctaaccacccatcaggcaatccatactgggaaaaaaccttacaaatgtaatgaatgtggcaaggtctttactcaaaatgctcacctggcaaatcaccgaagaattcatactggggagaaaccttacaggtgtacagagtgtgggaaagcctttagggtaagatcaagtctaactacccatatggcaatccacactggagaaaagcgttacaaatgtaatgagtgtggcaaggtcttcaggcagagttcaaatcttgcaagtcatcacagaatgcataccggagagaaaccttacaaatgagtgtggtgaggtcattaggtacaattcactcctttcacatcagttaatttcattcttgacagaatccttacaaatgtagtgacagtggccaatccctcatgagttgaagcattaatagatatgagaggccataagcaagagacatcatgtaaacatatgtggcagagggtctatccaggcctcgcaggttactaggcatcaagatttatatctttgatgaaacgaaacaaatgtaatatgcatcctgaggccattacccagtgaccgatggtaagtgaggattcctaggaggaataacagtctctggtttccctgtttgcctttgatattatacactgtagaatactcacaagtccaaatatgctaaaaattatatatttttaactcacatacgaaaaggttgcaggatatttgtaggcagtcagttaccttcaccttatgaaatgtttcactgagttatttgaggttttttggaaagcctactattgcgtttcaatgtgaactttgaaatcttattgtgcatccttacacaccttccatggtgctttcttggaaagatcattgggatggaaggatcattgattgggtgaagatcattgattaggtgaaggattatttctatccaatttgtgaagaaggaggactttgcttttaaaattaagtatcatctgaattagcatttgggagtggcgaaaaacaatgtaaaactatgatgtcactcaccattctgataatgttcagggtgcctttctcctaccaggagagtactgtggcttagaggaaagaaatggtctatcaactgaacatgaaatggagcaggccaagaccttaggacattgggatttttgtgggaggagagtaataggtaattagacactgattgtgtggtagaaatactgcaggggaaaaggtcgccctcttatgcatcaaagagcaatacctgttgtttagcaaagagtgatgaaaaattgatcttgttttgaaattgaagagagaggccaggcgcggtggctcacacctgtaatcccagcactttgggaggctgaggcaggtggatcacctgaggtcgggagttcgagaccagcctgaccaacatggagaaaccccaattgtactaaaaatacaaaattagccgggcgtggtggcaggtgcctgtaatcccagctacttgggaggctgaggcaggagagtgcttgaacccaggaggcggaggttgtggtgagccaagatcatgccactgcactccagcctgggcaacaagaacaaaactccatctaaagaagaaaaagaaaaactgaagagagagtagttgtcagagtgaagagtttaatcaacagaagtagagtaacatattctttagtagaactcacattatctgcttgaagcacattttgctaatgttttattcagaatgtatcatagatataatgttttaactaataaaatagaatggtttttctcta

SEQ ID NO: 2 - protein, 818 aa, Homo sapiens
MALTQVRLTFRDVAIEFSQEEWKCLDPAQRILYRDVMLENYWNLVSLGLCHFDMNIISMLEEGKEPWTVKSCVKIARKPRTPECVKGVVTDIPPKCTIKDLLPKEKSSTEAVFHTVVLERHESPDIEDFSFKEPQKNVHDFECQWRDDTGNYKGVLMAQKEGKRDQRDRRDIENKLMNNQLGVSFHSHLPELQLFQGEGKMYECNQVEKSTNNGSSVSPLQQIPSSVQTHRSKKYHELNHFSLLTQRRKANSCGKPYKCNECGKAFTQNSNLTSHRRIHSGEKPYKCSECGKTFTVRSNLTIHQVIHTGEKPYKCHECGKVFRHNSYLATHRRIHTGEKPYKCNECGKAFRGHSNLTTHQLIHTGEKPFKCNECGKLFTQNSHLISHWRIHTGEKPYKCNECGKAFSVRSSLAIHQTIHTGEKPYKCNECGKVFRYNSYLGRHRRVHTGEKPYKCNECGKAFSMHSNLATHQVIHTGTKPFKCNECSKVFTQNSQLANHRRIHTGEKPYKCNECGKAFSVRSSLTTHQAIHSGEKPYKCIECGKSFTQKSHLRSHRGIHSGEKPYKCNECGKVFAQTSQLARHWRVHTGEKPYKCNDCGRAFSDRSSLTFHQAIHTGEKPYKCHECGKVFRHNSYLATHRRIHTGEKPYKCNECGKAFSMHSNLTTHKVIHTGEKPYKCNQCGKVFTQNSHLANHQRTHTGEKPYRCNECGKAFSVRSSLTTHQAIHTGKKPYKCNECGKVFTQNAHLANHRRIHTGEKPYRCTECGKAFRVRSSLTTHMAIHTGEKRYKCNECGKVFRQSSNLASHHRMHTGEKPYK

SEQ ID NO: 3 - DNA, 4907 bp, Homo sapiens
ggactgcgggataggaagctggggatatggacaagcagcagcgttatagcgctctgggtttcgggacataggcctgggccatgcggcccccttggccccttggcgcgacccccaggaacgttcggaaagctggtcctcgtggctgggggaaaggcggggggtgggggggaagcgggcacgtgaccccggtcagccaatctgggtgctgctgacgtggccgcgcggccccgatgctctccccacccccccagcccgttcgggaagggaggggctgggggctacgccccctcccccagcacggcttcgttttctgggggggggttgacaccccggattacataccccgtaccaagccgagggcaactttggaggccccctggaaggctttaggatccagattcttcgctgctgctgccttaccgccgagaaccaccacccgccaggcgtcttgcggccacacccctggcgggttcaggcaggctacgcccacgcgacccctcccgtttccctgctttggccaatggaggagctacgaatggcacgacctgctcgagcttggcagtctccagttgggctgtgcatggaagcttgggaagactttgttggaaggggaggcggggagagagtgctggaggctctggggcgatggcttccgcacctcttccaaccaccctctttccctggagtcggcggaccacagctcagccaattggcttggagatgtggcgggttgccacttccctgtgggtctctgcggcactcttctgcctggtgactgacaccttggaaatgaagtttatgacgtcatcgttgcggctggccaatagaaaaagctcccgcggagaggtgttccttccccttcgactcagcttcttcacccgcgtgagcgagcgcgcgcgcgcggagggggtggggaaaagctcaagcagggtggcgcgcatgagcggcgaagctcctcctccccgcctatatataaagggctggcgcggggctcggcggcgccatttcgtgctggagtggagcagcctctagaacgagctggaggattctgcctaccgatacagagccttcgagtcgtccggggccgccattacaatccacctccatccgcttggaaatggccttcgtcccggcctatgactggtcccagcgggcagtacagaccccctagaagcccctggagctcccctttttcgggccccgcccaatcctcggagtctgtccaccccctctactccgccctcaagaggatttcaaagatggaggcggcggctccctaaaccacttttcgtgttcatccgcctccatccgagatcgaaacgggacctcgtcggccccgtaggggcccgacaagaagagggaatccctgcagaccaacagcgggctatattgacgacggtgtctgagatcggggaccgtcttttgaagagtcagtccctccttagttgcccgcctcagctgaggccgccgccattttcttgctgtccgccgtctgcagagcgcgccaagctgcccggagctctccgagaggccccaaagagactgctttcgtgccggccaggcagggggtttgtcgcctggaggcccaagaggaacggcctccccccaacttagcgggttatgctggaccgggcggtgaggggaaccgaggccacccggactttccgcggctgagggcagcgccggttccttgcggtcaagatgctgcaaaacgtgactccccacaataagctccctggggaagggaatgcagggttgctggggctgggcccagaagcagcagcaccagggaagaggattcgaaaaccctctctcttgtatgagggctttgagagccccacaatggcttcggtgcctgctttgcaacttacccctgccaacccaccacccccggaggtgtccaatcccaaaaagccaggacgagttaccaaccagctgcaatacctacacaaggtagtgatgaaggctctgtggaaacatcagttcgcatggccattccggcagcctgtggatgctgtcaaactgggtctaccggattatcacaaaattataaaacagcctatggacatgggtactattaagaggagacttgaaaacaattattattgggctgcttcagagtgtatgcaagattttaataccatgttcaccaactgttacatttacaacaagcccactgatgatattgtcctaatggcacaaacgctggaaaagatattcctacagaaggttgcatcaatgccacaagaagaacaagagctggtagtgaccatccctaagaacagccacaagaagggggccaagttggcagcgctccagggcagtgttaccagtgcccatcaggtgcctgccgtctcttctgtgtcacacacagccctgtatactcctccacctgagatacctaccactgtcctcaacattccccacccatcagtcatttcctctccacttctcaagtccttgcactctgctggacccccgctccttgctgttactgcagctcctccagcccagccccttgccaagaaaaaaggcgtaaagcggaaagcagatactaccacccctacacctacagccatcttggctcctggttctccagctagccctcctgggagtcttgagcctaaggcagcacggcttccccctatgcgtagagagagtggtcgccccatcaagcccccacgcaaagacttgcctgactctcagcaacaacaccagagctctaagaaaggaaagctttcagaacagttaaaacattgcaatggcattttgaaggagttactctctaagaagcatgctgcctatgcttggcctttctataaaccagtggatgcttctgcacttggcctgcatgactaccatgacatcattaagcaccccatggacctcagcactgtcaagcggaagatggagaaccgtgattaccgggatgcacaggagtttgctgctgatgtacggcttatgttctccaactgctataagtacaatcccccagatcacgatgttgtggcaatggcacgaaagctacaggatgtatttgagttccgttatgccaagatgccagatgaaccactagaaccagggcctttaccagtctctactgccatgccccctggcttggccaaatcgtcttcagagtcctccagtgaggaaagtagcagtgagagctcctctgaggaagaggaggaggaagatgaggaggacgaggaggaagaagagagtgaaagctcagactcagaggaagaaagggctcatcgcttagcagaactacaggaacagcttcgggcagtacatgaacaactggctgctctgtcccagggtccaatatccaagcccaagaggaaaagagagaaaaaagagaaaaagaagaaacggaaggcagagaagcatcgaggccgagctggggccgatgaagatgacaaggggcctagggcaccccgcccacctcaacctaagaagtccaagaaagcaagtggcagtgggggtggcagtgctgctttaggcccttctggctttggaccttctggaggaagtggcaccaagctccccaaaaaggccacaaagacagccccacctgccctgcctacaggttatgattcagaggaggaggaagagagcaggcccatgagttacgatgagaagcggcagctgagcctggacatcaacaaattacctggggagaagctgggccgagttgtgcatataatccaagccagggagccctctttacgtgattcaaacccagaagagattgagattgattttgaaacactcaagccatccacacttagagagcttgagcgctatgtcctttcctgcctacgtaagaaaccccggaagccctacaccattaagaagcctgtgggaaagacaaaggaggaactggctttggagaaaaagcgggaattagaaaagcggttacaagatgtcagcggacagctcaattctactaaaaagccccccaagaaagcgaatgagaaaacagagtcatcctctgcacagcaagtagcagtgtcacgccttagcgcttccagctccagctcagattccagctcctcctcttcctcgtcgtcgtcttcagacaccagtgattcagactcaggctaaggggtcaggccagatggggcaggaaggctccgcaggaccggacccctagaccaccctgccccacctgccccttccccctttgctgtgacacttcttcatctcacccccccccgcccccctctaggagagctggctctgcagtgggggagggatgcagggacatttactgaaggagggacatggacaaaacaacattgaattcccagccccattggggagtgatctcttggacacagagcccccattcaaaatggggcagggcaagggtgggagtgtgcaaagccctgatctggagttacctgaggccacagctgccctattcacttctaagggccctgttttgagattgtttgttctaatttattttaagctaggtaaggctggggggagggtggggccgtggtcccctcagcctccatggggagggaagaagggggagctctttttttacgttgatttttttttttctactctgttttccctttttccttccgctccatttggggccctgggggtttcagtcatctccccatttggtcccctggactgtctttgttgattctaacttgtaaataaagaaaatattattcaagttttgagttaccttaatatttgcttttgtagtgtttcaaaaggaacatcataagaattgtcttgataattttgagggaaatattactgcagtgagaaaaggcaatagctaacctataattggattgtcttaatttttaaaccagtaggcttttgctgtgtttttaataaagtaaatatgacttttgtaaattgaaaaaaaaaaaaaa

SEQ ID NO: 4 - protein, 801 aa, Homo sapiens
MLQNVTPHNKLPGEGNAGLLGLGPEAAAPGKRIRKPSLLYEGFESPTMASVPALQLTPANPPPPEVSNPKKPGRVTNQLQYLHKVVMKALWKHQFAWPFRQPVDAVKLGLPDYHKIIKQPMDMGTIKRRLENNYYWAASECMQDFNTMFTNCYIYNKPTDDIVLMAQTLEKIFLQKVASMPQEEQELVVTIPKNSHKKGAKLAALQGSVTSAHQVPAVSSVSHTALYTPPPEIPTTVLNIPHPSVISSPLLKSLHSAGPPLLAVTAAPPAQPLAKKKGVKRKADTTTPTPTAILAPGSPASPPGSLEPKAARLPPMRRESGRPIKPPRKDLPDSQQQHQSSKKGKLSEQLKHCNGILKELLSKKHAAYAWPFYKPVDASALGLHDYHDIIKHPMDLSTVKRKMENRDYRDAQEFAADVRLMFSNCYKYNPPDHDVVAMARKLQDVFEFRYAKMPDEPLEPGPLPVSTAMPPGLAKSSSESSSEESSSESSSEEEEEEDEEDEEEEESESSDSEEERAHRLAELQEQLRAVHEQLAALSQGPISKPKRKREKKEKKKKRKAEKHRGRAGADEDDKGPRAPRPPQPKKSKKASGSGGGSAALGPSGFGPSGGSGTKLPKKATKTAPPALPTGYDSEEEEESRPMSYDEKRQLSLDINKLPGEKLGRVVHIIQAREPSLRDSNPEEIEIDFETLKPSTLRELERYVLSCLRKKPRKPYTIKKPVGKTKEELALEKKRELEKRLQDVSGQLNSTKKPPKKANEKTESSSAQQVAVSRLSASSSSSDSSSSSSSSSSSDTSDSDSG

SEQ ID NO: 5 - DNA, 2111 bp, Homo sapiens
agatagattgtgtaagggtacagttgtgaggataacagaaacatggcagattatttaaaatcatcctgaaagtggtgctttatctgatgaaagtgattgtaatccatagggaaatgtttcaacgtgcgcaagcgttgcggcggcgggcagaggactactacagatgcaaagtaaggagcttcctccccgcagttgcaggatagttcagtgctgatgcagatgatgccacggcccttagactctctcaacattcaatttctcatgtgttggctttttcagatcaccccttctgcaagaaagcctctttgcaaccgggtaagtttgcttgttttccttgcttttggacatagtctgccaggtcaggacatggatacatttttctccctacggctctgtgctcaagccctgcagagggagatggcagagaggaaggctgcctacaagcatcacagtcccatccctgttggtaaccgtgttgcgcaaaaacaccttcatccccacccagtggggcccccatctaatattctaagtgtcagaggttccatatttgtaatagcaaatgggccctgactgtaaattagtgaagagtgaatgtaacttattacccacagggacaattccaaatgaaggccttaaatgatgctcagctaagctggttcttgtgtggcctctgtaccttcaaaagctgccgagtcctatgattacacgcgatgggacttctacacttgaagtgaaacacagttttaaaacttgctttgtttagaattcccacctcatttttccatggacaaaagtattctttaggtcctagtgcacttacaatttggtattacctgggagtgaaaagaaatattacagccatgcctaactgacttcttgaggtaagattgttctgtcagaaaaccctctcccagttcccctgcagctcttcaggaatccacatctctccagagctctttgttctcatgggtggcacctccagagtgaagaagatcctttgtcaagaagggaaacagaggggaaatgagagggtcctgcaggcagagctggaatcaacttccactctgcctcttgcaagctgtgtgaccctgggcacaatttctccttcctctggaaacctctgttttcttagatttggagcagggtggtcacactgaccttgcagagttctgagaatcagagacagaacataaaaggcctggaaaacattctccaaaaagaagctgcaacatgtgtggacaatgggcttttcatgcctctcttactgtctcttactgtctattgacctggtgcaagaaacatgctctggtgatggctgtgagggaggaatgaggatagacatagacactcctgtgtctcaaacatgcttctttattactctgttatgactctgtcttccctggggcaggaccccagcctgcctacatttgcagacagacacagtggcatgtggagacaacagtgtgtcccaatgacttttctttaccccccagttgtcggcagtactcagtggaagggtgatattatgacactgacactgctattttgaaacctggaggatggaaaggtgcaaaaatctatcaccagcaacagaaggtgcagactgtgttggtggcggtaattttgtccatcaaatgaatatgtgtgaaaacattccctcctttggccctacaggtcagaatggcggcagtggagcatcgtcattcttcaggattgccctactggccctacctcacagctgaaactttaaaaaacaggatgggccaccagccacctcctccaactcaacaacattctataattgataactccctgagcctcaagacaccttccgagcgtctgctctatccccttccaccctcagcggatgataatctcaagacacctcccgagtgtctgctcactccccttccaccctcagctctaccctcagcggatgataatctcaagacacctgccgagtgtctgctcactccccttccaccctcagctccaccctcagcggatgataatctcaagacacctcccgagtgtctgctcactccccttccaccctcagcggatgataatctcaagaaactaatgaagaataaataaataatataaaaata

SEQ ID NO: 6 - protein, 1 aa, Homo sapiens
M

SEQ ID NO: 7 - DNA, 5170 bp, Homo sapiens
aaaagagacgctggagcggttaaaaaaaatttctgaggtggggaccataatggaagagaccaccggggagcgccgagaagaaatccgagcagcgaggctcagaaaaaaggtcttctaggggatgtggggtcaggggagcggagacgccggggaggggtccgtaccagccgagggttcgggcgctgggggctccgctccgtgttccgctctggcagaggaacgaacgggagccgggaagaatccccgaaggaagaccgcgatccctagcacctcgatcgctacgcaacaggtagcgaaagtcccggagcccagccgcatcgtggacacgctaggctggatgcggaaccgaccccacctggagcctcgccctgctgcagccgcgcttccggctccaggtagccgcctctaagcaataacgccaggccttatcgtcgcagcgacagtggcgtcacgtccgccggcgcgccacagcagcgcgtcacttccgccagcccgccacagcggggcgtcacctcggacatacgaacagcgggcggtgttcccggctccgtggggccgtcttcccggcgagtccgcgacggtcgccgcccacggcgaggaacccttaacattcagggatgtggccatagaattctctccagaagagtggaaatgcctggaccctgcccagcagaatttgtatagagatgtgatgttggagaactacagaaacctggtctccctagctatgtgttctcatttcacccaagactttttgccagtgcaggggatagaagattcattccacaaacttatactgagaagatatgagaaatgtgggcatgataatttacaattaaggaaaggctgtaaaagtatgaacgtgtgtaaagtgcagaagggagtttataatggaattaataaatgcttgtcaaatactcagagcaaaatatttcaatgtaatgcacgtgtcaaagtttttagtaaatttgcaaattcaaacaaagataagacaagacatactggagagaaacactttaaatgtaacgaatgtggcaagtcatttcagaagttctcagacctaactcaacataaaggaattcatgctggagagaaaccctacacttgtgaagaacgtggcaaagactttggatggtacacagacctgaatcaacacaagaaaattcatactggagagaaaccttacaaatgtgaagaatgtggcaaagcctttaataggtcaacaaaccttactgcacataagagaattcacaacagagagaaagcttacacaggtgaagatcgtgacagagcctttggatggtccacaaacctgaatgaatataagaaaattcatactggagataaaccctacaaatgtaaagaatgtgggaaagcctttatgcattcctcacacctgaataaacatgagaaaattcatactggagagaaaccctacaaatgtaaggaatgtggcaaagtcatttcctcatcctcaagctttgctaaacataagaggattcatactggcgagaaaccctttaaatgtttagaatgtggtaaagcctttaatatttccacaacccttactaaacataggagaattcatactggagagaaaccctacacatgtgaagtatgtggcaaagcctttagacagtccgcaaacctttatgtacataggagaattcatactggagagaaaccctacacatgtggagaatgtggcaaaacctttagacagtccgcaaacctttacgtacataggagaattcatactggagagaaaccttacaaatgcgaagactgtggcaaagcctttggacggtacacagccctgaatcaacacaagaaaattcatactggagagaaaccttacaaatgtgaagagtgtggcaaagcctttaatagttcaacaaaccttactgcacataagagaattcacaccagagagaaaccctacacatgtgaagatcgtggcagagcctttggattgtccacaaacctgaatgaatataagaaaattcatactggagataaaccctacaaatgtaaagaatgtgggaaagcctttatacattccttgcacctgaataaacatgagaaaattcatactggaaagaaaccctacaaatgtaagcaatgtggcaaagtcattacctcatcctcaagctttgctaaacataagaggattcatactggcgagaaaccctttgaatgtttagaatgtggtaaagcgtttactagttccacaacccttactaaacataggagaattcatactggagagaaaccctacacatgtgaagtatgtggcaaagcctttagacagtccgcaatcctttatgtacataggagaattcatactggagagaaaccctacacatgtgaagaatgtggcaaaacctttagacagtccgcaaacctttatgtacataggagaattcatactggagagaaaccttacaaatgtgaagagtgtggcaaagcctttggacggtacacagacctgaatcaacacaagaaaattcatactggagagaaactttacaaatgtgaagagtgtggcaaagactttgtatggtacacggacctgaatcaacagaagaaaatttacactggggagaaaccttacaaatgtgaagagtgtggcaaagcctttgccccatcaacagacctgaatcaacacacgaaaattcttactggagagcaaagttacaaatgtgaagagtgtggcaaagcctttggatggtccatagccctgaatcaacacaagaaaattcatactggagaaaaaccttacaaatgtgaagagtgtggcaaagcctttagtaggtcaagaaaccttactacacataggagagttcacactagggagaaaccctacaaatgtgaagatcgtggcagatcctttggatggtccacaaacctgaacgaatataagaaaattcatactggagataaactctacaaatgtaaagaatgtgggaaagtgtttaaacagtcctcacacctgaatagacatgagaaaattcatactggaaagaaaccctacaaatgtaaggaatgtggcaaagtcattacgtcatcctcaagctttgctaaacataagaggattcatacaggtgagaaaccctttaaatgtttagaatgtggtaaagcgtttactagttccacaacccttactaaacataggagaattcatactggagagaaaccctacacatgtgaagaatgtggcaaagcctttagacagtcagcaatcctttatgtacataggagaattcatactggagagaaaccctacacatgtggagaatgtggcaaaacctttagacagtctgcaaatctttatgcgcataagaaaattcatactggagagaaaccctacacgtgtggagactgtggcaaaacctttagacagtctgcaaatctttatgcacataagaaaattcatactggagataaaaccatacaagtgtaaagaatgtggcaaagcctttaagtcatactacagcattcttaaacataagagaactcataccaggggaatgtcttacgaaggtgacgaatgtcgcggtctttaaatgctcctcaatcctttctaatcataagataattcataatgaagagaaactctaaaatgtgaaaaatgtgagaaggcttttaatcacacctcaatctgttgtagacataagagtaattatattgatgagaagccaaattaaaattaaaaatgtggcaaagacttccaattctagtcagttcttaatgtaattcctactgaagaaaacacctggaaatacaaaaaatgtggcaaaacttgtaaccaatgcttagcatttttgcacatgatagtatttatatgtgagactacttgtacaaacataaaaatatacaaaagctattgtctacttgaaatttatagttaataaaagcattataaatgtaatttctgttgaaagaccttttagaaaatataggccattaaagtgaagaatagtcttaagacagagaatacaaagataaagagggctctagtacctgtacttgtatcccagaacttactatatgcattttgtactagaggaaaactctgaagcagttgcttaaactttgttcaacatcagagaatttatattggagagaaatcctacaaatgtaataaatgtggaaaaacctctgttcagaaactgcaggttaagaaaccagaggccaggcgcggtggctcacgcctgtaatcccaacactttgggaggccaaggagggtggatcacctgaggtcgggagttcaaggacagcctgaccaatatggagaaacctcgtctgtactaaaaatacaaaaattagcaggacatggtggtgcatggctgtaatcccagctactcaggaggctgagacaggagaatggcttgaacccaggaggtggaggttgcggtgagctgagatcgtgccattgcactccagcctgggtaacaagagtgaaactctgtctcaaaacaagataaaaagaaaagaaacaccagagaatttttactagaatataatttgtaggtgcagtaaatgtgaagaaatatttaggctaaaattaagactatgtaaacatcagaggatttacagtagaaagaactaaggaactaacacttcagactttaaaataaatcagagtattaagtataacaaaagttgaacctgttagaaaatttccttgtatataagttgaaaagtaggtttttgaagagatatattcgaaatatattttttcacttgaaaaaagtaaaaatttttttcaaaagcaaataattcaactctaaaattatactatttcaacattctcatttatgtgaaagcatgtgataaattgttgctgcgtcagagatatgagaaactcctttgcattaggtgggcattattcatagacttctacatgaaagagaagagaaataaaagatgcaccaggaaaatctgagcagagaggcttttagtggttgacttactgagtgatgcctgaagtaggtgttcagagtaatactttgcgttatactgagagagaatctgaattttagtagtaaattgttttgccaactgtatatttatgtaataagtgcaataaaatgcagtaaattttaaaattctcttaagataatgtgtgaacttaatttttgaaataaaaattgttattgtgttaaaa

SEQ ID NO: 8 - protein, 923 aa, Homo sapiens
MLENYRNLVSLAMCSHFTQDFLPVQGIEDSFHKLILRRYEKCGHDNLQLRKGCKSMNVCKVQKGVYNGINKCLSNTQSKIFQCNARVKVFSKFANSNKDKTRHTGEKHFKCNECGKSFQKFSDLTQHKGIHAGEKPYTCEERGKDFGWYTDLNQHKKIHTGEKPYKCEECGKAFNRSTNLTAHKRIHNREKAYTGEDRDRAFGWSTNLNEYKKIHTGDKPYKCKECGKAFMHSSHLNKHEKIHTGEKPYKCKECGKVISSSSSFAKHKRIHTGEKPFKCLECGKAFNISTTLTKHRRIHTGEKPYTCEVCGKAFRQSANLYVHRRIHTGEKPYTCGECGKTFRQSANLYVHRRIHTGEKPYKCEDCGKAFGRYTALNQHKKIHTGEKPYKCEECGKAFNSSTNLTAHKRIHTREKPYTCEDRGRAFGLSTNLNEYKKIHTGDKPYKCKECGKAFIHSLHLNKHEKIHTGKKPYKCKQCGKVITSSSSFAKHKRIHTGEKPFECLECGKAFTSSTTLTKHRRIHTGEKPYTCEVCGKAFRQSAILYVHRRIHTGEKPYTCEECGKTFRQSANLYVHRRIHTGEKPYKCEECGKAFGRYTDLNQHKKIHTGEKLYKCEECGKDFVWYTDLNQQKKIYTGEKPYKCEECGKAFAPSTDLNQHTKILTGEQSYKCEECGKAFGWSIALNQHKKIHTGEKPYKCEECGKAFSRSRNLTTHRRVHTREKPYKCEDRGRSFGWSTNLNEYKKIHTGDKLYKCKECGKVFKQSSHLNRHEKIHTGKKPYKCKECGKVITSSSSFAKHKRIHTGEKPFKCLECGKAFTSSTTLTKHRRIHTGEKPYTCEECGKAFRQSAILYVHRRIHTGEKPYTCGECGKTFRQSANLYAHKKIHTGEKPYTCGDCGKTFRQSANLYAHKKIHTGDKTIQV

SEQ ID NO: 9 - DNA, 1557 bp, Homo sapiens
acccgctgagcgtcgacacagtcgctgttggcctggtgtccagcgtggttgtctatcccgtctacctggccatcctctttctcttccggatgtcccggagcaaggtggctgggagcccgagccccacacctgccgggcagcaggtgctggacgtcgacagctgcctggactcatccgtgctggacagctccttcctcacgttctcaggcctccacgctgaggtgagggctctactgggggtcctgccgccttggcgcagcttggactcaagaccctgtgcacctctcagcaggcctttgctggacagatgaagagtgacttgtttctggatgattctaagaggttgatggacggatggctacatggatgtgatggagatggtttactatcgggaccttccgcatcctgctgatgttttgttgcttaggatatgaatggctgagcggaggctgtaaaacctggcactctgcttgggttatcaatactctggctgaccatcgtcatcgtgggactgactttggtggaagtccttggttacttatcattactgtgtttctgagaagttataaatttgccatctccctctgcacaagttacctttgtgtgtctttcctgaagactatcttcccgtctcaaaatggacatgatggatccacggatgtacagcagagagccaggaggtccaactgccgtagacaggaaggaattaaaattgtcctggaagacatctttactttatggagacaggtggaaaccaaagttcgagctaaaatccgtaagatgaaggtgacaacaaaagtcaaccgtcatgacaaaatcaatggaaagaggaagaccgccaaagaacatctgaggaaactaagcatgaaagaacgtgagcacggagaaaaggagaggcaggtgtcagaggcagaggaaaatgggaaattggatatgaaagaaatacacacctacatggaaatgtttcaacgtgcgcaagcgttgcggcggcgggcagaggactactacagatgcaaaatcaccccttctgcaagaaagcctctttgcaaccgggtcagaatggcggcagtggagcatcgtcattcttcaggattgccctactggccctacctcacagctgaaactttaaaaaacaggatgggccaccagccacctcctccaactcaacaacattctataattgataactccctgagcctcaagacaccttccgagtgtgtgctctatccccttccaccctcagcggatgataatctcaagacacctcccgagtgtctgctcactccccttccaccctcagctctaccctcagcggatgataatctcaagacacctgccgagtgcctgctctatccccttccaccctcagcggatgataatctcaagacacctcccgagtgtctgctcactccccttccaccctcagctccaccctcagcggatgataatctcaagacacctcctgagtgtgtctgctcactccccttccaccctcagcggatgataatctcaagaaactaaggaagaataaataaataatataaaaaaaaaaaaaaa

SEQ ID NO: 10 - protein, 369 aa, Homo sapiens
MFCCLGYEWLSGGCKTWHSAWVINTLADHRHRGTDFGGSPWLLIITVFLRSYKFAISLCTSYLCVSFLKTIFPSQNGHDGSTDVQQRARRSNCRRQEGIKIVLEDIFTLWRQVETKVRAKIRKMKVTTKVNRHDKINGKRKTAKEHLRKLSMKEREHGEKERQVSEAEENGKLDMKEIHTYMEMFQRAQALRRRAEDYYRCKITPSARKPLCNRVRMAAVEHRHSSGLPYWPYLTAETLKNRMGHQPPPPTQQHSIIDNSLSLKTPSECVLYPLPPSADDNLKTPPECLLTPLPPSALPSADDNLKTPAECLLYPLPPSADDNLKTPPECLLTPLPPSAPPSADDNLKTPPECVCSLPFHPQRMIISRN

SEQ ID NO: 11 - DNA, 3222 bp, Homo sapiens
ccgggtgagacaaatcgggcgccatcttgtcttgttcccgaagaagtagaagcatcgaaagcgttggagaggtgttaccggaacggcggcgacaagggtgttcccgaactagagtggggcatacataatcttgctgctatgcttcgaagctgtagtctgaatcaacctaagttttaaacagaaggtgaacctctgagatagaaaatcaagtatattttaaaagaagggatgtgggatcaaggaggacagccttggcagcagtggcccttgaaccagcaacaatggatgcagtcattccagcaccaacaggatccaagccagattgattgggctgcattggcccaagcttggattgcccaaagagaagcttcaggacagcaaagcatggtagaacaaccaccaggaatgatgccaaatggacaagatatgtctacaatggaatctggtccaaacaatcatgggaatttccaaggggattcaaacttcaacagaatgtggcaaccagaatggggaatgcatcagcaacccccacacccccctccagatcagccatggatgccaccaacaccaggcccaatggacattgttcctccttctgaagacagcaacagtcaggacagtggggaatttgcccctgacaacaggcatatatttaaccagaacaatcacaactttggtggaccacccgataattttgcagtggggccagtgaaccagtttgactatcagcatggggctgcttttggtccaccgcaaggtggatttcatcctccttattggcaaccaggacctccaggacctccagcacctccccagaatcgaagagaaaggccatcatcattcagggatcgtcagcgttcacctattgcacttcctgtgaagcaggagcctccacaaattgacgcagtaaaacgcaggactcttcccgcttggattcgcgaaggtcttgaaaaaatggaacgtgaaaagcagaagaaattggagaaagaaagaatggaacaacaacgttcacaattgtccaaaaaagaaaaaaaggccacagaagatgctgaaggaggggatggccctcgtttacctcagagaagtaaatttgatagtgatgaggaagaagaagacactgaaaatgttgaggctgcaagtagtgggaaagtcaccagaagtccatccccagttcctcaagaagagcacagtgaccctgagatgactgaagaggagaaagagtatcaaatgatgttgctgacaaaaatgcttctaacagaaattctgctggatgtcacagatgaagaaatttattacgtagccaaagatgcacaccgcaaagcaacgaaagctcctgcaaaacagctggcacagtccagtgcactggcttccctcactggactcggtggactgggtggttatggatcaggagacagtgaagatgagaggagtgacagaggatctgagtcatctgacactgatgatgaagaattacggcatcgaatccggcaaaaacaggaagctttttggagaaaagaaaaagaacagcagctattacatgataaacagatggaagaagaaaagcagcaaacagaaagggttacaaaagagatgaatgaatttatccataaagagcaaaatagtttatcactactagaagcaagagaagcagacggtgatgtggttaatgaaaagaagagaactccaaatgaaaccacatcagttttagaaccaaaaaaagagcataaagaaaaagaaaaacaaggaaggagtaggtcgggaagttctagtagtggtagttccagtagcaatagcagaactagtagtactagtagtactgtctctagctcttcatacagttctagctcaggtagtagtcgtacttcttctcggtcttcttctcctaaaaggaaaaagagacacagtaggagtagatctccaacaatcaaagctagacgtagcaggagtagaagctattctcgcagaattaaaatagagagcaatagggctagggtaaagattagagatagaaggagatctaatagaaatagcattgaaagagaaagacgacgaaatcggagtccttcccgagagagacgtagaagtagaagtcgctcaagggatagacgaaccaatcgtgccagtcgcagtaggagtcgagataggcgtaaaattgatgatcaacgtggaaatcttagtgggaacagtcataagcataaaggtgaggctaaagaacaagagaggaaaaaggagaggagtcgaagtatagataaagataggaaaaagaaagacaaagaaagggaacgtgaacaggataaaagaaaagagaaacaaaaaagggaagaaaaagattttaagttcagtagtcaggatgatagattaaaaaggaaacgagaaagtgaaagaacattttctaggagtggttctatatctgttaaaatcataagacatgattctagacaggatagtaagaaaagtactaccaaagatagtaaaaaacattcaggctctgattctagtggaaggagcagttctgagtctccaggaagtagcaaagaaaagaaggctaagaagcctaaacatagtcgatcgcgatccgtggagaaatctcaaaggtctggtaagaaggcaagccgcaaacacaagtctaagtcccgatcaaggtagtatactttttaaagtattttgtctgatttttaaaaaaaattgactgaatttattcaaagttgaaagtgtcctttctctctctctttaataaactcagtttggtacttgataaataatcatagtcttaaatgttagaaatcctatataatattatttatttaaaattgcagatttttaatttaaaatacatttttatttttaaattttgtcttttcccttttttttcagatcaacaacccctccccgtcgtaaacgctgaggaatgatgtggcaagaatgccatgatgttctttaaaaaaattccatgagttttaagggcttgtctcattatagaggcacattgtggctgtgtaggtgaaaccagaatcttttttttttttaatctgtaaataggtgtactttttccaatgctgctccaagttacttaataggatttctttgtattacgtttttttcaaaaaatatagtgcataataagactataaacatgccattctctttcagctgtaatgttcttaaaattattcttgaatgtactgtgatgtcaataaagctctttagttcatttttgttaaa

SEQ ID NO: 12 - protein, 805 aa, Homo sapiens
MWDQGGQPWQQWPLNQQQWMQSFQHQQDPSQIDWAALAQAWIAQREASGQQSMVEQPPGMMPNGQDMSTMESGPNNHGNFQGDSNFNRMWQPEWGMHQQPPHPPPDQPWMPPTPGPMDIVPPSEDSNSQDSGEFAPDNRHIFNQNNHNFGGPPDNFAVGPVNQFDYQHGAAFGPPQGGFHPPYWQPGPPGPPAPPQNRRERPSSFRDRQRSPIALPVKQEPPQIDAVKRRTLPAWIREGLEKMEREKQKKLEKERMEQQRSQLSKKEKKATEDAEGGDGPRLPQRSKFDSDEEEEDTENVEAASSGKVTRSPSPVPQEEHSDPEMTEEEKEYQMMLLTKMLLTEILLDVTDEEIYYVAKDAHRKATKAPAKQLAQSSALASLTGLGGLGGYGSGDSEDERSDRGSESSDTDDEELRHRIRQKQEAFWRKEKEQQLLHDKQMEEEKQQTERVTKEMNEFIHKEQNSLSLLEAREADGDVVNEKKRTPNETTSVLEPKKEHKEKEKQGRSRSGSSSSGSSSSNSRTSSTSSTVSSSSYSSSSGSSRTSSRSSSPKRKKRHSRSRSPTIKARRSRSRSYSRRIKIESNRARVKIRDRRRSNRNSIERERRRNRSPSRERRRSRSRSRDRRTNRASRSRSRDRRKIDDQRGNLSGNSHKHKGEAKEQERKKERSRSIDKDRKKKDKEREREQDKRKEKQKREEKDFKFSSQDDRLKRKRESERTFSRSGSISVKIIRHDSRQDSKKSTTKDSKKHSGSDSSGRSSSESPGSSKEKKAKKPKHSRSRSVEKSQRSGKKASRKHKSKSRSR

SEQ ID NO: 13 - DNA, 10528 bp, Homo sapiens
gtgctcgcgtcgcagccaatcgcggggcgacgctgtcctgggagcgaggaggctgtggtgagagacggaccgagaccggagatgttttcaagcccggctccggcggctttacaggcggctgcagcggcgacgaagacaacgacagcgacggctacgccgaagcactcgttccgggggtgaagcctcctgcgccggccttgcctcggatccaggatgagaagactgataaaagaagaagctagctgaacagctgtaaaatgcccaaatctgggttcacaaaaccaattcagagtgaaaattctgacagtgacagcaatatggtagagaaaccatatggaagaaagagtaaagacaagattgcatcctacagcaaaactccaaaaattgaacgaagtgatgtgagcaaggagatgaaagagaaatcatccatgaaacgtaaacttccttttactattagcccatcaagaaatgaagaacgagattcagacacagattcagatccaggacatacaagtgaaaattggggggagagacttatatcttcttacaggacatactcagagaaagaaggtccagaaaagaagaagacaaaaaaggaagctggaaataagaaatccacaccagttagcattctttttggttatccactctctgagcgaaaacagatggcacttcttatgcagatgacagcaagagacaacagtccagattccacaccaaatcatccatcacaaacaacgcctgcccaaaagaaaactcccagttcttcatctcgacagaaagataaagttaataaaagaaatgaacgtggtgaaactcctttacacatggctgctattcgaggagatgtgaaacaagttaaagaattaataagtttaggggcaaatgtgaatgtgaaagattttgcaggttggacaccactgcatgaagcttgcaatgttggatattacgatgttgctaagatacttatagcagctggagcagatgttaacacacaaggattagatgatgacactccactccatgattctgctagtagtgggcacagagatatagtaaagctgttacttcgtcacggtggaaatccatttcaagctaataaacatggggagcgtccagtggatgtagcagaaacagaggagttggagttgctactaaaaagagaggtgcctttatctgatgatgatgaaagttacacagattccgaagaggctcaatctgtaaatccttctagtgttgatgaaaatattgactctgaaacagagaaagactctctcatctgtgaaagtaaacagatacttcccagtaaaacacctcttccatctgcccttgatgagtatgagttcaaagatgatgatgatgaagaaattaataagatgattgatgataggcatattcttaggaaagaacaacgaaaagaaaatgaacctgaagcagaaaaaactcatttatttgcaaaacaggagaaagccttctatcctaaatcatttaaaagtaaaaaacaaaagccatctagggtcttatattcaagtactgaaagttctgatgaagaagctcttcagaataaaaagatttctacttcatgttccgtcatccctgaaacatcaaattctgatatgcaaaccaaaaaggaatatgtagtttcaggtgaacacaaacagaaaggcaaagttaaaagaaaattgaaaaatcagaataaaaataaagagaaccaagagctaaagcaagaaaaggaaggaaaagaaaatacaagaataacaaacttgacagtaaatactggactagattgttcagaaaagaccagagaggaggggaactttaggaaatcttttagcccaaaagatgatacttcattacatttatttcatatttccactggtaaatctcccaaacattcttgtggattaagtgaaaaacagtcaacaccactaaaacaagaacatactaaaacatgtttatcaccaggaagttctgaaatgtcattacagcctgatcttgttcggtatgataatacagaatctgaattcttgccagaaagttcaagtgtaaaatcttgtaagcataaggaaaaaagcaaacatcagaaagatttccacttagaatttggtgaaaaatcaaatgccaaaataaaggatgaagatcatagtccaacatttgaaaattcagattgcacactgaaaaaaatggataaagaaggtaaaacattaaaaaaacataaattgaagcataaagagagggaaaaagaaaagcataaaaaagaaattgaaggtgaaaaggaaaaatacaaaactaaggatagtgccaaagaactgcagaggagtgtggaatttgatagagaattttggaaagagaatttttttaaaagtgatgaaactgaagatctctttttaaatatggaacatgaatccttaacattagaaaaaaaatcaaaattggaaaaaaacatcaaagatgataaatcaaccaaggaaaagcatgtgtcaaaagagaggaactttaaagaggaacgagacaagattaaaaaggaaagcgagaaatcttttagggaggaaaaaataaaagatctaaaagaagagagagaaaacatacccacagataaagactcagaatttacttctttgggtatgagtgccattgaggaatctatagggcttcatttagtggaaaaggaaatagacattgaaaaacaagaaaagcatataaaggaaagtaaagaaaaacctgagaagcgatctcaaattaaagaaaaggacattgagaagatggaaagaaaaacctttgaaaaagaaaagaagataaaacatgagcataagtcagaaaaagacaaattagatcttagtgaatgtgttgataaaataaaagaaaaggacaagctatattcgcatcacacagaaaaatgccataaagaaggtgagaagagcaaaaatactgctgctattaaaaaaactgacgacagagagaaaagtagagaaaagatggataggaaacatgacaaagaaaagcctgaaaaagagaggcatctagcagaaagcaaagaaaagcacttgatggagaaaaaaaataaacaatcagataatagtgaatacagtaaatcagaaaaaggcaaaaataaagaaaaagacagggagctagataaaaaggaaaaatctagagataaagaaagtataaatataactaactccaaacacatacaggaagaaaaaaaatcaagtatagtagacggtaataaagcacaacatgaaaaacccttatcccttaaagaaaaaacaaaagatgaacctttgaaaactccagatggaaaagaaaaagataaaaaagataaagatatagatagatacaaagaacgagacaaacataaagataaaattcaaataaatagcttactcaaactaaaatctgaagcagataagcctaaacctaagtcatcaccagcatcaaaagatacccgacctaaagaaaagaggttagtgaatgatgatttaatgcagacaagttttgaacgaatgctaagccttaaagacctagaaatagaacagtggcacaaaaaacataaggaaaaaattaagcaaaaagaaaaggaacggttgagaaaccgaaactgtttagaacttaaaataaaagataaagaaaaaacaaagcatacaccaactgaatccaaaaataaagaacttactaggtcaaagagttcagaagtgactgatgcatataccaaggagaaacaacctaaagatgctgtaagtaacagatcacaatctgttgacaccaaaaatgtaatgactttagggaagtcatcttttgtttcagataatagcttaaacaggtctcctagatcagaaaatgaaaagccgggtctcagctccagatctgtatccatgatttctgttgctagttcagaagattcctgccatactacagtgacaaccccaaggcctccagttgagtatgactctgactttatgttagagagttcagaatcccaaatgtccttttcccagtcaccttttttgtcaattgccaaatctcctgctcttcatgaaagggaattggacagcctggctgacttgccggagcggattaaaccaccatatgcaaacagactttcaacatcccatcttaggtcatcttctgtagaagatgttaaactaattataagcgaggggagacctaccatagaagttcgaagatgtagcatgccttctgtcatttgtgaacataccaaacaattccaaacaatatcagaagagagcaatcaaggtagcttattaactgtgccaggagatactagtccttctcccaaacctgaggtattctcaaatgtgcctgaaagagacctttcaaatgtatctaacatacattccagttttgcaacttctccaactggagcttcaaacagcaagtatgtttcagctgatagaaatctcatcaagaatactgccccagtgaacactgtaatggacagtccagtgcatttagagccatctagtcaggttggtgtgatccagaataaatcatgggagatgcctgttgatagactagagacattaagcaccagagactttatctgcccaaattctaacatacctgatcaagaatcctctcttcagagtttttgtaattctgaaaataaggtattgaaagaaaatgctgattttttatccctgcgccagactgaactgccaggaaactcttgtgctcaggatccggcatcctttatgcctccacagcagccttgctctttccccagccaatcactttcagatgctgaatcgatttctaaacatatgtctttgtcatatgttgctaatcaagagccaggtattttacaacaaaaaaatgcagttcagattattagttctgctttagatactgataatgaatctacaaaagatacagaaaatacttttgtcctaggagatgttcaaaaaacagatgcctttgtcccagtgtactctgacagcactattcaagaagcatcaccaaactttgagaaagcttatactttacctgtgttaccatcagaaaaggactttaatggaagtgatgcctctacccagctaaatacacattatgcatttagcaaactaacttacaagtcttccagtggccatgaagttgagaatagcacaactgatactcaggtcatttcacatgaaaaagaaaacaaactggagagtttggttttaactcatttgagtaggtgtgattctgatttatgtgaaatgaatgcagggatgccaaaaggaaacctaaatgaacaagatccaaaacattgtcctgaaagtgaaaagtgtttgctttccatagaagatgaggaatctcaacaaagcattttatcaagtctggaaaaccattcacagcagtcaactcaaccagaaatgcataaatatggtcagttagttaaagtagaattagaagaaaatgccgaagatgataaaactgaaaaccaaatccctcaaagaatgactagaaacaaagcaaatacaatggcaaatcaaagcaaacagattcttgctagctgtacactattatcagaaaaagacagtgaatcctcatctcctagaggaagaataagattaactgaagatgacgatcctcaaattcaccatccacggaaaaggaaagtgtcacgtgtacctcagcctgtgcaagtgagtccctctttactacaagcaaaagagaaaactcagcaatctctggcagccattgtagattctctaaaactagatgagattcagccatacagttcagagagagcaaatccatattttgaatacttgcacataaggaaaaaaatagaagaaaaacgcaaattactgtgtagtgtgattcctcaagcacctcagtactatgacgaatatgtaacatttaacggatcatatctcctggatggaaaccccttaagcaagatttgtattcccacaattacaccaccaccttcactgtcagatccacttaaagagctttttcgacaacaggaagttgtaaggatgaaactacgtttgcaacacagtattgaaagggaaaaactcattgtatccaacgaacaagaagttttgcgagttcattacagagctgcaagaacattggcaaatcaaacactgccatttagtgcttgtactgttttgctggatgccgaagtatacaatgtaccattggactctcagtctgatgacagtaaaacttctgtgagggatcgctttaatgcaagacaattcatgtcttggttacaagatgtggatgataaatttgacaaattaaagacctgtcttttaatgaggcaacaacatgaagctgcggctttaaatgctgtccagaggttagaatggcagctcaaactccaggaacttgatcctgccacctataaatctatcagcatttacgaaatccaggagttttatgttccccttgttgatgttaacgacgactttgaattgactcctatatagcagtcagtacttcctgatggtattgtcctaaactggtgatgctcaagcattatactgtggaatactgccttttgacaaaaatactcatgcctttacaattgttagtaaagttcgattatagttggttatgtagtaaacactgtcattttataaaaaatgagaattattttggatcttagatccaaacacagtttctaatagaaaactattatttatattgggaaaggtaactattgcattagagcatgttggcagactggtaggtatttaaaaagttgagaatctgctaacagcgctggaagttgttagcgctctaagtaataagataaccactagtattcaaatctctttcaggttttattaaaaaatatatatcaataaactaaaaggttcaattcctaccaaatagtttctaatgtgggagaaaaacttggcacaaaatttcttcagtttattatctgtaaattgtacagttttctttttgaaagttttaatattgtcttcctttttaataacttattttatacatattgtgcagatgtaaatcttgtaattaatggtcaaactgtataaagggattggtagtcaaaacatgtacaaagaaatacctgtaaaactgttttgtctcatgttttattggaccaaagttgtggtttgtatggagtgtagtagtagtgtgtacaggtagaaaacttttaaatacagcatgcaggtgtttcagttagcttgttttcatcaccataactgcaaagatgtggcttagttgtattgcatgcttcctataatttaactctccataattgatgcctgcagtagtgtaaggcatttcatactagtctcctctagtagacctgtgacttactgtgttggacatattatttagacttagtcatacaaagaaacttagctcttttttcatctcacagtaaagcctatttccccaggaaaaaaataaatgcctttgaatgaaaattctgaaattgtaaatgtctattttaatattcacctatgaaagaatctgtgaatatatgtaaatacgtttaataaattttattggtcatgttaaatcattgtaaaacttttttacattgcttaatgttttaagcttaatagcctttgcacttttaaaataaaaaccaagtatgcaaatcaaagatatttggtagtcaaaataagtaaaagaaatataggaatattccagtcaatctctgaaatgtttatgaaaaacaggttaatatgttgtatttttttccttgtatcaagatgcaaaacataatttgcaaaattttataattgaaataaaacttggtatgctgttttataataaattagcaatatactttaaaaaaaatccagtttctcctataacatgatgtaaattaaatattcaggaatatttcaggtctgaaatctgctgctgaacttgttagacatttttgaaaggaaaattaggttagcgtacaatttatcataaatatatgaggtaaaatttgcaaaactttccacagtactttcttgaattataatactgaatgttttctgttccgatagagaaaagtgaagcaaatatgtgaggaatgaagtgatctagtgcaagttggtaattccagctaatgggagagaatgtaaatgtgcaaaggtacatattaagcttagggatttttgaatttttacgtcagtttatattttaattcttactgtacttggcatgcgcaataaagcagcacatgtaaaaaaaaaatacacagtgcaaggactttattataaaggttggatgtagttttccttagaaatttaggtgagagattttggccttttttattggataaattgggccagaaaggcagggtagatttcgaagcactggttctgttgaagttaagtttattaagcctgggaacattaaaagctaatttataaaagcaatactttttaatatgaaaacttactgcaaagtttgtttatacttttgcctaaaaaggaaattggatgggatactgtggcaaatcataaaaaaccagataattgaactttgaagttatagaaaatcagagaggggtaagtttatagggcattttgttctgatggttcaaccagaggtctgggaaatagcactgttggcccaaacagaacaggcttttagaagataaaagcgacaagaaggaatctggtgaattttagtcatcccagctttttagtcttaaccacagttctcactctcttaaatggtacctcaaaaagctggagcctctctgccatgattatgcttctacaaatttcttttataaagagactcaaagctaatgatagcttaaaagaaaagttaatgccttctcattggaaatgtataatcaaataagtagttaagggcttttggtattaaagatattctgaagctctgaaatgctagaaaaaaatttggaatggagtatatgcctgaaaaggttttggattcagaaagaaaaaggatggttagtttaatcagtgattctttttaaactcttcaaatatcatgaacaagatactaaattgtacctaaggatttgtatttctttacaatttgttctaaatatctgtttaatgactagttgatatttgtgcatgttatttaataaagagttatatttttatagaaaaaaagagtgaaatgtgtgctaactgtttttttacttaattttacttgggcagctagcaaaattgcagaaatatgcatcctgggaaaagaaacagcctttgaagaattagcctttcaagttcaaatctatttaataatgagaagtctcacaagtgaatttttaagtacaggcatacctcagacgtactttaggttccagaccatctcagtaaagcaaataccacaacaaagcgagtcaggaggaattttttggtttcccagtgcatataaaagttttgtttatactatattaagtgtgcaatagcattatgtctaaaaatatgtacataagtttaaaaatattttattgctaaaaatggtaacaaagtgagcacatgctgttggaaaaagagcaccaatagacttgcttgaagcagggttgccacaaaccttcaatttgtaaaaaacgccaatatgtacaaagcacaataaagcaaagcacaatagaacaggattgcctgtattagacatgctacaaacttcataactggaaacatctcaaagaccccatgaagctcatttgaatgggacttaacaattagacagttattttagaaattgagtgcagacctaaatacatagttttccaaaaagaaaattattgtctctgatatcttaaaacataaaaacccaaaattttatatagaagaaattgactctgtaaaacgcaatgaaatagtcctctttttaaacagtttaaaggaagcattttcaccgtttgtaaaaattatttttaaatatttagggcaaaatttttgttagataataatggaaaagcttgtgtgagtttagtggttaaaatatcttgtaattcatcattatttaagtgacttcttgggagccgtctttgtacctaaaatggagtttttttttaagcctccacagagatagtcacccaaagtatttccagtcagtaaaagtagaattcatagaaaaaactgaggcaaattaaaacaattccattaatcaaaatggctttaaacaaattaagtattagcataaaaatagcaaaaagtacaactaaaaaaatggttgggttttcccagtggttaaatgctatataataactgcaaataaaagtttttttgtacatggacagcgtcctcataaaagaaaataggccaggccaggcgcagtggctcgcgcctgtaatcccagcactttgggaggccaaggcgggcggatcacgaggtcaggagatcgagaccatcctggctaacacggtgaaaccccgtctctactaaacaaaatgcaaaaaatcagccgggtgtggccgcgggcgcctgtagttccagctactcgggaggctgaggcaggagaatggcgtgagcctgggaggcggagcttgcagtgagccgagatcgtgccactgcactccagcctgggcgacagagcgagactccgtctc

SEQ ID NO: 14 - protein, 2062 aa, Homo sapiens
MPKSGFTKPIQSENSDSDSNMVEKPYGRKSKDKIASYSKTPKIERSDVSKEMKEKSSMKRKLPFTISPSRNEERDSDTDSDPGHTSENWGERLISSYRTYSEKEGPEKKKTKKEAGNKKSTPVSILFGYPLSERKQMALLMQMTARDNSPDSTPNHPSQTTPAQKKTPSSSSRQKDKVNKRNERGETPLHMAAIRGDVKQVKELISLGANVNVKDFAGWTPLHEACNVGYYDVAKILIAAGADVNTQGLDDDTPLHDSASSGHRDIVKLLLRHGGNPFQANKHGERPVDVAETEELELLLKREVPLSDDDESYTDSEEAQSVNPSSVDENIDSETEKDSLICESKQILPSKTPLPSALDEYEFKDDDDEEINKMIDDRHILRKEQRKENEPEAEKTHLFAKQEKAFYPKSFKSKKQKPSRVLYSSTESSDEEALQNKKISTSCSVIPETSNSDMQTKKEYVVSGEHKQKGKVKRKLKNQNKNKENQELKQEKEGKENTRITNLTVNTGLDCSEKTREEGNFRKSFSPKDDTSLHLFHISTGKSPKHSCGLSEKQSTPLKQEHTKTCLSPGSSEMSLQPDLVRYDNTESEFLPESSSVKSCKHKEKSKHQKDFHLEFGEKSNAKIKDEDHSPTFENSDCTLKKMDKEGKTLKKHKLKHKEREKEKHKKEIEGEKEKYKTKDSAKELQRSVEFDREFWKENFFKSDETEDLFLNMEHESLTLEKKSKLEKNIKDDKSTKEKHVSKERNFKEERDKIKKESEKSFREEKIKDLKEERENIPTDKDSEFTSLGMSAIEESIGLHLVEKEIDIEKQEKHIKESKEKPEKRSQIKEKDIEKMERKTFEKEKKIKHEHKSEKDKLDLSECVDKIKEKDKLYSHHTEKCHKEGEKSKNTAAIKKTDDREKSREKMDRKHDKEKPEKERHLAESKEKHLMEKKNKQSDNSEYSKSEKGKNKEKDRELDKKEKSRDKESINITNSKHIQEEKKSSIVDGNKAQHEKPLSLKEKTKDEPLKTPDGKEKDKKDKDIDRYKERDKHKDKIQINSLLKLKSEADKPKPKSSPASKDTRPKEKRLVNDDLMQTSFERMLSLKDLEIEQWHKKHKEKIKQKEKERLRNRNCLELKIKDKEKTKHTPTESKNKELTRSKSSEVTDAYTKEKQPKDAVSNRSQSVDTKNVMTLGKSSFVSDNSLNRSPRSENEKPGLSSRSVSMISVASSEDSCHTTVTTPRPPVEYDSDFMLESSESQMSFSQSPFLSIAKSPALHERELDSLADLPERIKPPYANRLSTSHLRSSSVEDVKLIISEGRPTIEVRRCSMPSVICEHTKQFQTISEESNQGSLLTVPGDTSPSPKPEVFSNVPERDLSNVSNIHSSFATSPTGASNSKYVSADRNLIKNTAPVNTVMDSPVHLEPSSQVGVIQNKSWEMPVDRLETLSTRDFICPNSNIPDQESSLQSFCNSENKVLKENADFLSLRQTELPGNSCAQDPASFMPPQQPCSFPSQSLSDAESISKHMSLSYVANQEPGILQQKNAVQIISSALDTDNESTKDTENTFVLGDVQKTDAFVPVYSDSTIQEASPNFEKAYTLPVLPSEKDFNGSDASTQLNTHYAFSKLTYKSSSGHEVENSTTDTQVISHEKENKLESLVLTHLSRCDSDLCEMNAGMPKGNLNEQDPKHCPESEKCLLSIEDEESQQSILSSLENHSQQSTQPEMHKYGQLVKVELEENAEDDKTENQIPQRMTRNKANTMANQSKQILASCTLLSEKDSESSSPRGRIRLTEDDDPQIHHPRKRKVSRVPQPVQVSPSLLQAKEKTQQSLAAIVDSLKLDEIQPYSSERANPYFEYLHIRKKIEEKRKLLCSVIPQAPQYYDEYVTFNGSYLLDGNPLSKICIPTITPPPSLSDPLKELFRQQEVVRMKLRLQHSIEREKLIVSNEQEVLRVHYRAARTLANQTLPFSACTVLLDAEVYNVPLDSQSDDSKTSVRDRFNARQFMSWLQDVDDKFDKLKTCLLMRQQHEAAALNAVQRLEWQLKLQELDPATYKSISIYEIQEFYVPLVDVNDDFELTPI

SEQ ID NO: 15 - DNA, 2286 bp, Homo sapiens
cgaagagtgcgcaggcgcgccgacagccgagttttctgcgcttccttctccctctctccagacgtcgtggtcgttcggtcctatgtcgcgccgggccctccggaggctgaggggggaacagcgcggccaggagcccctcgggcccggcgccttgcatttcgatctccgtgatgacgatgacgcggaagaagaagggcccaagcgggagcttggtgtccggcgtcccgggggcgcagggaaggagggcgtccgagtcaacaaccgcttcgagctgataaacattgacgatcttgaggatgaccctgtggtgaacggggagaggtctggctgtgcgctcacagacgctgtggcaccagggaacaaaggaaggggtcagcgtggaaacacagagagcaagacggatggagatgacaccgagacagtgccctcagagcagtctcatgcaagtggcaaactccggaagaagaaaaaaaaacagaaaaacaagaaaagcagcacgggagaagcatcggaaaacggactagaagatatcgatcgcatcctagagaggattgaggacagcactgggttgaaccgtcccggcccagctcccctgagctccaggaagcacgttctctacgtggagcacagacacttgaatccagacacagaactgaaaaggtattttggtgcccgggcaatcctgggggagcaaaggccacggcagagacaacgtgtgtaccccaagtgcacatggctgaccacccctaaaagcacctggccccgctacagcaaaccaggtctgtccatgcggctgctggaatcaaaaaaaggcctctccttctttgcgtttgagcacagtgaggagtaccagcaggctcagcacaagttcctggtggccgtggagtctatggagccgaacaacatcgtggttctgctccagacgagcccttaccacgttgactcactcctgcagctcagcgatgcctgccgctttcaagaggatcaggagatggctcgagacctcgtagagagagcgctgtacagcatggaatgtgcgttccaccccctgttcagtctcaccagtggggcctgccggctggattaccgcagacccgagaacaggagcttctacctggccctctacaagcagatgagcttcctggagaagcgaggctgcccgcgcacggcgctggagtactgcaagctcatcctgagtctcgagccggatgaggaccccctctgcatgctgctgctcatcgaccacctggccttgcgggcccggaactacgagtacctgatccgcctcttccaggagtgggaggctcatcggaacctgtcccagctccctaattttgccttctctgttccactggcgtatttcctgctgagccagcagacagacctccctgagtgtgagcagagctctgccaggcagaaggcctctctcctgatacagcaggcgctcaccatgttccctggagtcctcctgcccctgctcgagtcttgcagtgtgcggcccgacgccagcgtttccagtcaccgcttctttggacccaatgctgaaataagccagccccctgccctgagccagctggtgaacctgtaccttgggaggtcacactttctctggaaagagcccgccaccatgagctggctggaggagaacgtccacgaggttctgcaagcagtggacgccggggacccagccgtggaagcctgtgagaaccggcggaaggtgctctaccagcgtgcacccaggaatatccaccgccatgtgatcctctctgagatcaaggaagccgtcgctgccctgcccccggacgtgaccacgcagtctgtgatggggtttgatcctctgcctccttcggacacaatctactcctacgtcaggccagagaggctaagtcctatcagccatggaaacaccattgctctcttcttccggtcactgttgccaaactataccatggagggggagaggcccgaggaaggagtggctgggggtctgaaccgcaaccagggcctgaacaggctgatgctggctgtgcgcgacatgatggccaacttccacctcaacgacctggaggcgccgcacgaggacgacgctgagggggagggggagtgggactgagcgtccgcagaggtgaccgaaaagccgtatgatgatgttcccgatttctctgttggtcggagtcggccagttgcctgaagtagggaagctgagtgtgtcgctccctggtccactgtttctcctataaatgtaaatgggtcacgctcaaaaaaaaaaaaaaaaaaaaaaaaaaa

SEQ ID NO: 16 - protein, 676 aa, Homo sapiens
MSRRALRRLRGEQRGQEPLGPGALHFDLRDDDDAEEEGPKRELGVRRPGGAGKEGVRVNNRFELINIDDLEDDPVVNGERSGCALTDAVAPGNKGRGQRGNTESKTDGDDTETVPSEQSHASGKLRKKKKKQKNKKSSTGEASENGLEDIDRILERIEDSTGLNRPGPAPLSSRKHVLYVEHRHLNPDTELKRYFGARAILGEQRPRQRQRVYPKCTWLTTPKSTWPRYSKPGLSMRLLESKKGLSFFAFEHSEEYQQAQHKFLVAVESMEPNNIVVLLQTSPYHVDSLLQLSDACRFQEDQEMARDLVERALYSMECAFHPLFSLTSGACRLDYRRPENRSFYLALYKQMSFLEKRGCPRTALEYCKLILSLEPDEDPLCMLLLIDHLALRARNYEYLIRLFQEWEAHRNLSQLPNFAFSVPLAYFLLSQQTDLPECEQSSARQKASLLIQQALTMFPGVLLPLLESCSVRPDASVSSHRFFGPNAEISQPPALSQLVNLYLGRSHFLWKEPATMSWLEENVHEVLQAVDAGDPAVEACENRRKVLYQRAPRNIHRHVILSEIKEAVAALPPDVTTQSVMGFDPLPPSDTIYSYVRPERLSPISHGNTIALFFRSLLPNYTMEGERPEEGVAGGLNRNQGLNRLMLAVRDMMANFHLNDLEAPHEDDAEGEGEWD

SEQ ID NO: 17 - DNA, 1707 bp, Homo sapiens
gggaagctccaggcaaacagcccagcaaacagcagcactcagctaaaaggaagactcacagaacacagttgaagaaggaaagtggcgatggacctcatcccaaatttggcggtggaaacctggcttctcctggctgtcagcctggtgctcctctatctatatgggacccgtacacatggactttttaagagactgggaattccagggcccacacctctgcctttgttgggaaatgttttgtcctatcgtcagggtctctggaaatttgacacagagtgctataaaaagtatggaaaaatgtggggaacgtatgaaggtcaactccctgtgctggccatcacagatcccgacgtgatcagaacagtgctagtgaaagaatgttattctgtcttcacaaatcgaaggtctttaggcccagtgggatttatgaaaagtgccatctctttagctgaggatgaagaatggaagagaatacggtcattgctgtctccaaccttcaccagcggaaaactcaaggagatgttccccatcattgcccagtatggagatgtattggtgagaaacttgaggcgggaagcagagaaaggcaagcctgtcaccttgaaagacatctttggggcctacagcatggatgtgattactggcacatcatttggagtgaacatcgactctctcaacaatccacaagacccctttgtggagagcactaagaagttcctaaaatttggtttcttagatccattatttctctcaataatactctttccattccttaccccagtttttgaagcattaaatgtctctctgtttccaaaagataccataaattttttaagtaaatctgtaaacagaatgaagaaaagtcgcctcaacgacaaacaaaagcaccgactagatttccttcagctgatgattgactcccagaattcgaaagaaactgagtcccacaaagctctgtctgatctggagctcgcagcccagtcaataatcttcatttttgctggctatgaaaccaccagcagtgttctttccttcactttatatgaactggccactcaccctgatgtccagcagaaactgcaaaaggagattgatgcagttttgcccaataaggcaccacctacctatgatgccgtggtacagatggagtaccttgacatggtggtgaatgaaacactcagattattcccagttgctattagacttgagaggacttgcaagaaagatgttgaaatcaatggggtattcattcccaaagggtcaatggtggtgattccaacttatgctcttcaccatgacccaaagtactggacagagcctgaggagttccgccctgaaaggttcagtaagaagaaggacagcatagatccttacatatacacaccctttggaactggacccagaaactgcattggcatgaggtttgctctcatgaacatgaaacttgctctaatcagagtccttcagaacttctccttcaaaccttgtaaagaaacacagatccccttgaaattagacacgcaaggacttcttcaaccagaaaaacccattgttctaaaggtggattcaagagatggaaccctaagtggagaatgagttattctaaggatttctactttggtcttcaagaaagctgtgccccagaacaccagagatttcaacttagtcaataaaaccttgaaataaagatgggcttaatctaatgta

SEQ ID NO: 18 - protein, 502 aa, Homo sapiens
MDLIPNLAVETWLLLAVSLVLLYLYGTRTHGLFKRLGIPGPTPLPLLGNVLSYRQGLWKFDTECYKKYGKMWGTYEGQLPVLAITDPDVIRTVLVKECYSVFTNRRSLGPVGFMKSAISLAEDEEWKRIRSLLSPTFTSGKLKEMFPIIAQYGDVLVRNLRREAEKGKPVTLKDIFGAYSMDVITGTSFGVNIDSLNNPQDPFVESTKKFLKFGFLDPLFLSIILFPFLTPVFEALNVSLFPKDTINFLSKSVNRMKKSRLNDKQKHRLDFLQLMIDSQNSKETESHKALSDLELAAQSIIFIFAGYETTSSVLSFTLYELATHPDVQQKLQKEIDAVLPNKAPPTYDAVVQMEYLDMVVNETLRLFPVAIRLERTCKKDVEINGVFIPKGSMVVIPTYALHHDPKYWTEPEEFRPERFSKKKDSIDPYIYTPFGTGPRNCIGMRFALMNMKLALIRVLQNFSFKPCKETQIPLKLDTQGLLQPEKPIVLKVDSRDGTLSGE

SEQ ID NO: 19 - DNA, 5109 bp, Homo sapiens
ggcggccgctcgggcaggatggcggcggccgcggtgggcgcgggccacggcgcggggggcccgggcgcagcgagcagcagtggtggggcgcgcgagggcgcgcgggtggcggcgctgtgcctgctgtggtacgcgctgagcgcgggcggcaacgtggtcaacaaggtgatcctgagcgccttcccgttcccggtgaccgtgtcgctgtgccacatcctggctctgtgcgctgggctcccgccgctgctgcgcgcctggcgcgtgccccccgcgccgcccgtctcgggccccggacccagtccgcatccgtcgtccggcccgctgctgccgccgcgcttctacccgcgctacgtgctaccgctcgccttcggcaagtacttcgcgtccgtgtcagcgcacgtcagcatctggaaggtgcccgtgtcctatgcacacaccgtcaaggccaccatgcccatctgggtggtcctcctgtcccggatcattatgaaggagaagcagagcaccaaggtatacttgtcactcatccccatcatcagcggtgtcctgctggccaccgtcaccgagttgtcttttgacatgtggggactcgtcagcgccctcgccgccacgctgtgcttctcgcttcagaacattttctccaaaaaggtcttgcgagattcacggatccaccatctccggctgctcaacatcctgggctgccacgccgtcttctttatgatccccacctgggttctggtggacctctcggctttcctggtcagcagcgacttgacctacgtctaccagtggccctggacgctcctgctcctggctgtcagcggcttctgtaactttgcccagaatgttatcgccttcagcatcctcaacctcgttagccccctgagctactcggtcgccaatgccaccaaaagaatcatggtcatcacggtgtccctgatcatgctgcgcaacccagtcaccagcaccaacgtcctgggcatgatgaccgccatcctgggggtcttcctctataacaagaccaagtacgatgcaaaccagcaagccaggaagcacctcctccccgtcaccacagcagacctgagcagcaaggagcgtcaccggagcccactggagaagccccacaacggcctcctcttcccccagcacggggactatcagtacggccgcaacaacatcttaacagaccacttccaatacagccggcagagctacccaaactcgtacagtttgaaccgctatgatgtgtagagtccaaaggacaggaccagactgttggtgactccttccccggcccccacagcagtatcagaaacttctgacaatcagtgaatgtacaacccagccgaggggacggtgcataactctccatcagaagccctggggttcctggccccccgtgagccgcaggaggatgcgttgcctgcagtgcagacggccgtgagctctgggcaaacctaaacagagaccagtgtctcatgctctttcttcctggagtctgtcatctgagggccgtgtccctgcggagatcttggccacgttgtacctttccatgtggaattattccccaagcagtgtagctcagagcacttgtgtctgcattccagataacattcaggacctgtgtgaaaagctggggtcactgtggctgtagaccatgaactggcagtgggggtgtccagggcggtgcttgagaacgtcagactggctagtttaattccctggcgcagatacgcataggaccaacagggtcaccaagcagacagggagcccgcgagaatcattcaaaacatccccagccacagagatggatccagtttcctggtcatccccttagcagttcacaagttcctggcaaatgttccaaagcaaaaagcgattgcaattagcatccagttcctgcagcctggtgctctgccctgcacgtcagggttggcatccacccagatccagatggaagggaaacttctctcttctcctttgcctcctcttccctcaccagagcagggcgcttctcttggggtggtgagaaggatcttcgagaaatcgtgttcagtatttcaagctctatttctgtggcacatgtcttttgagaggcatcttcacctcttctgtgatgacttggtatgttgtttggtagagagatcttgattttcggaggatcttgcatttttctagggaatattttgtagttgtgtgtgtgtgtttttgccttggtccccattatgggatgcattaggactggcctatgcatcgaaaatctttttgtttgtaaacgtttaaaaacaaagttccccggccaggcacagtggctcacacctgtaatcccagcactttgggaggccaagatgggcggatcacgaggtcaggagttcgagaccagcctggccaacatagtgaaaccccatctctactaaaaatacagaaattagccgggcatggtgtcgcgtgcctgtagtcccagctcctcaggctgctgaggcaggcgaattgcttgaacctgggaggcagaagttgtggtgagccgagattgtgcactccagcctgggtaacagagcgagactccatctcaaaaaaaaaaacaaaacaaaaccaagttcccactggtgatgcctgtctgacacgttttggtatttagtaggaaatgaagtgtttcgaagcttcgagagaagcttcaaaattgtcacaattgctgaaaacagaatgaatcgtgaacattatctcaatattttgtataatagacaagaccacagtgttttggttccctgacctgtttttgtgtttatgttaggatctgaatcatgttctgggtaaggggacgaggagcgaacactgcactaagatttggtttgccaaatcagattctttggtcaagagtcagtttggggccaggcgtggtggctcatgcctgtaatctcagcactttgggaggctgaggtgggtggatcactggagtttgagaccaccctggccaacatggtgaaaccccatctctactaaaacaaaaattagccaggcatggtggcacctgcctgtaatcccagctacttgggaggctgaggcaggagaatcacttgagcccaggaggtggaggtttcagcgagctgagatcacaccactgcactccagccttggtgacagagtgagactctgtctcaaaaaaaaaaaaaaaaaaaaggaatcagtttgggtcttggcagaaatcaacataaggaatatgacaagaccccagtaggtaaccctgagtgctcaggtccgagctgtggtctcttttacggcttcatgaaaggaccgtgccctcacggaggggaccacggcttggcttgtggggtcttaggtgatggctgccttctttcttcatcaccacacccagcttcttgctggcacttaggggaagagagcagcaaatgagagatttaccttttatctcccagcgagcgagatgtttccctgttcagagaggaagtaacatcacttatgcttgactggtgtttcttttgttgttgtttgtttttctttcaattggaattctgtatttaagatgttatgtcagctgacacatgggacactcctgaagaggtgactggccccccaccctgtttggcggtgagtttccgcaccaccggcctcagaagtgtccctcttgcttcgtctcttgttcgcttgctttgtaaatactttggtcccaagctgagacaattgctgtgtaaaacgtgaagagtcaatcccaaagggtgttatttgtcagaagaacttgccgtgtgccttcaccgaaggcagtcaagtctgcagttggatttttctcactggtgaatgacaagaaacagggataattttgcactgcggagatattacgggagttgtctatatgattatatatagtacctgattctttgaacatattattgaactccaaaatgaattcgacctccattcaggcttcctgaaatctctgaagttgctgaaatttgtatattattttccttttccaatgcaagatctgctggtgacgggaaatgactgtctggttttattatggtttataaattaataaatgggctatttaattctgtatataaatttacagcaagtacgtacactggaatgaatgaggcaatcacgttacaccaaatcagcagatcaaaagacaaacacatatttctgagacttgaaggtccacatccccccgccccctgccaagatggagtcttgctttgttgctcaggctggagtgcagtggcgcagtctcagctcactacaacctccatcccccgggttcaggtgattctcgtgcctcagcctcccgagtagctgggattacaggcatgcaccaccacggctggctaattttttgtgtttttagtagagacagggtttcaccatgttggccaggctggtctcgaactcctggcctcaaatgatccgcccaccttggcctcccaaagtgctaggatgacaggcatgagccaccgtgcccagcctgattgacaatggcctcttgaaggctgggttttcccagccggacagtgcccgccccacatgctccactcccacgctttcatctgcaggcctgccttcctctcagccacctcactgctgagctctgtggtagagaatttcctttacccatcagggtatggtctggctggtaatactgactccaacccagctccttcattttatagaaggaggcatttctgaatcatgtttgttcaccatggcgagactcactgcagaatttttaaccaccttattttaagtcattcattctaggaacagtcaagcccctaccacaaaggggccagatccgttcaagtgaggaagcacttgcagtttctgaattttgctgtatatttgtcctatgtcacccaacaggccctttgctatagctgggacattaccagaccccaataccttagggtctcacagcctgaaggacacagagcattgaattattaaaagacctgaaaatattataatgtttttcaattgtcacctgttttcaagacttaaatgctatagacttttctgcaggaatgacgtgtatattcctcactggcatttaccaaaaataaatgatggtttccagggaaaaaaaaaaaaaaaaaa

SEQ ID NO: 20 - protein, 410 aa, Homo sapiens
MAAAAVGAGHGAGGPGAASSSGGAREGARVAALCLLWYALSAGGNVVNKVILSAFPFPVTVSLCHILALCAGLPPLLRAWRVPPAPPVSGPGPSPHPSSGPLLPPRFYPRYVLPLAFGKYFASVSAHVSIWKVPVSYAHTVKATMPIWVVLLSRIIMKEKQSTKVYLSLIPIISGVLLATVTELSFDMWGLVSALAATLCFSLQNIFSKKVLRDSRIHHLRLLNILGCHAVFFMIPTWVLVDLSAFLVSSDLTYVYQWPWTLLLLAVSGFCNFAQNVIAFSILNLVSPLSYSVANATKRIMVITVSLIMLRNPVTSTNVLGMMTAILGVFLYNKTKYDANQQARKHLLPVTTADLSSKERHRSPLEKPHNGLLFPQHGDYQYGRNNILTDHFQYSRQSYPNSYSLNRYDV

SEQ ID NO: 21 - DNA, 5346 bp, Homo sapiens
atgggacccaggcaggactccgcagtggtgcaccatctgggcatcgacagctcctcggtgtcggccccaccttgagccccagttccaccttctaccgcttcagcacctccggcgcggacagctcctcgctgtcgcctccactcccggccctgggccggacccgggagcagacgctcctcggcgcccgctcacggggacgagtcctgctccctgctatcccagacccctttctctggcgcatggagaacctgggggtcggcgaaggggcagaggcttgcagcaggttgagtcgctctcgcggccgccacagcatgaccagagccccgaagcacctgtggcggcaaccccggcgccccatccgcatccaacagcgcttctattcggatccggacaagtccgcgggctgccgcgagagggacctgagcccgcggccggagctcaggaagtcgcggctctcctggcccgtttcctcctgcaggcgctttgacctggaaaatgggctctcgtgtgggaggagggccctggaccctcagtccagccctggcctgggccggattatgcaggctccagtcccgcacagccagcggcgcgagtccttcctgtaccgctcagatagcgactatgaactctcgcccaaggccatgtctcggaactcctctgtggccagcgacctacatggagaggacatgattgtgacgccctttgcccaggtcctggccagtctgcggaccgttcggagcaacgtggcggcccttgcccgccagcaatgcctaggagcagccaagcagggacccgtcggaaacccttcatccagcaatcagctccctcctgcagaggacacggggcagaagctggcattggagacgctagacgagctggactggtgcctggatcagttggagacgctgcagacccggcactcggtgggggagatggcctccaacaagttcaagcggatcctgaaccgggagttgacccacctgtccgaaaccagccgctccgggaaccaggtgtccgagtacatctcccggaccttcctggaccagcagaccgaggtggagctgcccaaggtgaccgctgaggaggccccacagcccatgtcccggatcagtggcctacatgggctctgccacagtgccagcctctcctcagccactgtcccacgctttggggtccagactgaccaggaggagcaactggccaaggagctagaagacaccaacaagtggggacttgatgtgttcaaggtggcggagctaagtgggaaccggcccctcacagctatcatattcagcatttttcaggagcgggacctgctgaagacattccagatcccagcagacacactggccacctacctgctgatgctggaaggtcactaccacgccaatgtggcctaccacaacagcctacatgccgccgacgtggcccagtccacgcatgtgctgctggctacgcccgccctcgaggctgtgttcacagacttggaaatcctggctgccctctttgcaagcgccatccacgacgtggaccatcctggggtctccaaccagtttctgattaacaccaactcagagctggcgcttatgtacaacgacgcctcggtgctggagaaccatcacctggctgtgggcttcaagctgctgcaggcagagaactgcgatatcttccagaacctcagcgccaagcagcgactgagtctgcgcaggatggtcattgacatggtgctggccacagacatgtccaaacacatgaacctcctggccgacctcaagaccatggtggagaccaagaaggtgacaagcctcggtgtcctcctcctggacaactattccgaccgaatccaggtcttgcagaacctggtgcactgtgctgatctgagcaaccccaccaagccgctgcccctgtaccgccagtggacggaccgcatcatggccgagttcttccagcagggagaccgcgagcgtgagtcgggcctggacatcagtcccatgtgtgacaagcatacggcctcagtggagaagtcccaggtgggtttcattgactacattgctcacccactgtgggagacttgggctgacctggtccacccagatgcacaggacctgctggacacgctggaggacaatcgagagtggtaccagagcaagatcccccgaagtccctcagacctcaccaaccccgagcgggacgggcctgacagattccagtttgaactgactctggaggaggcagaggaagaggatgaggaggaagaagaggagggggaagagacagctttagccaaagaggccttggagttgcctgacactgaactcctgtcccctgaagccggcccagaccctggggacttacccctcgacaaccagaggacttagggccagccctgcgtgaactgcaggggcaatggatggtaaagccctttggctcttggcaggcagactttccaggaagaggctccatgtggctcctgcttcactttcccacccatttagggagacaatcaagctcttagttataggtggctcccagggtctaattggaggcacctggctggggtccactctgaccctagacttgcctaaaagagctctctaaggggcagcctcttacgatgccctggtgtctttctcctgggcttctatccctgtgaggagaggtgctgtctgctggagcctctagtccaccctctccagtggtcactcttgagtcacatctgtcacttaattatttccttctttatcaaatatttattgctcatctacttcgtgccagctttctgcctctgtagtagccctgcacaaagggtggggagtcaggagaccatcccaaaggcatctccctgtcttcctctaccaagcggctctctgcaagagcatggaaatgtgagtggggaaaattttcagcaccaaagcttcactcatacccagttttgtttctgaaactacggtagggggcaggaagaggagcagaaaagaagggctgggcaaggcatagtggcttatgcctgtaatcccggtactttgggaggctgaggtgggaggactgcttaagctcaggagtttgagaccagcctgggcaacatagcaagacccccaccatctctgaaaaaaaaaattagccaggcatggtggtgtgcacctgagaatcccagctactcagaaggttgagacaaaggggatcgcttgagcccaggagttggaggctgaagagagctatgactgcatcactgcactccagcctgggcaacacagcaagatcctgtctaaaaataaaaagaaaagagaaggaaaggaaagagacggggctctgaggccgagcacagtggcccatgcctataatcccagcactttgggaggctgaggcaggtggatcacctgaggttaggagttcgagaccagcctggccaacatggtgaaaccccatctctactaaaaatacaaaaattggctgggcatggtggcgggtgcctgtaatcccagctactggggaggctgaggcaggagaatcacttgaattcaggaggtggaggttgcagtgagccgacatcatgccactgcactccagcctgggcgacagagcaagacactgtctcaaaaaagaaaagaaaaaaaaaaaagccgggccaggtggctcacgcctgtaatcctagcactttgggaggctgagtgggggtggatcgcctgagatcaggagttcaaaatcagcctggccaacatagtgaaaccctgtctctactaaaaatacaaaaaattagaggctgggtgcggcggctcacacctgtaatcccagaactttgggaggccgaggcgggtggatcacgaggtcaggagttcaagaccagcctggccaacacggtgaaaccccatctctactaaaaatacacaaattagctgggcatggtgttgggtgcctgaatcccagctactcgggaggctgaggcaggagaatcgcttgaatccgggaggcggggcttgcagtgagccgagatcgtgccattgcactccagcctgggtgacagagcaagactccgtctcaaaaagaaaaaaaaaaaattagccaggcatggtggcaggtgcctgtaatcccagctacttgagaggctgaggcaggagaatcgcttgaacccgggaggtggaggttgtggtgagccgaggtcgcgccactgcactccagcctgggcaacgacaacaacaataaaaagagggggctctgtgcccggcatgtctctgaagactgattgaacctatgcaccagttgttgctttaagtcgctttattttctgtctttggtgtctctggatgtaggagccccctgctttctctgtccgcagaactccatactgggtcccctacgtgttcctccttccctaggacagcaacaaaaacacacaattttccctctctagcaggtctctaagtctcctgattcctgaaactgcctcagactccccctagagggagggaggcccctgaggctttcttgccatcatagcctcttctgggcctcagtttcccctctgtaacctgatcctagtacttggataaactccgacgaggtgtggggggttgttgtctgtgacctccctgaaatatcttagacatttggggtactgagcatttatctggggttaaataaaatctttacatcttaagacattcgattgaccaaattgagtgtcctggccatttcactgatgaggaaactgaggcgcagagaggtcctcttgccagctcaaagtcaagcatctgggcgcccaatgttagccagcggcaccccctggtggcgggcgtgggagacacggcggggcgcgcttgtcgggggttggggggtgggtcggaggggtggcatcctccagccctgatggtcccacttaccgcacctcgccgggaagagctcgtcctgctggtcgggcctccgagcggactgggcagcaccatgctcaagcctagggttcgatccccgcctccggaagcctcagtatccatccctcccctctgcctccctcttcgcgtgcctgaatatttatacaagatacaggcgtcatcacagccgccctcggcttccagagcagctggcttcgttcataaatattataaccactcagaattcatcatcatcacagttaatgataaaattccacagtgccagaactaaaagtcatccgggttcacgaacttggtgcatttccttccagacttttaaaaagaagatatttagggaatttttttttcaagatttttccccccagtccgcttacaaagtaataccatgttcgctgtaaaaaatttggaaataatggaaatgtataaagaaggaaataaaattctgctgtatctccaccca

SEQ ID NO: 22 - protein, 712 aa, Homo sapiens
MENLGVGEGAEACSRLSRSRGRHSMTRAPKHLWRQPRRPIRIQQRFYSDPDKSAGCRERDLSPRPELRKSRLSWPVSSCRRFDLENGLSCGRRALDPQSSPGLGRIMQAPVPHSQRRESFLYRSDSDYELSPKAMSRNSSVASDLHGEDMIVTPFAQVLASLRTVRSNVAALARQQCLGAAKQGPVGNPSSSNQLPPAEDTGQKLALETLDELDWCLDQLETLQTRHSVGEMASNKFKRILNRELTHLSETSRSGNQVSEYISRTFLDQQTEVELPKVTAEEAPQPMSRISGLHGLCHSASLSSATVPRFGVQTDQEEQLAKELEDTNKWGLDVFKVAELSGNRPLTAIIFSIFQERDLLKTFQIPADTLATYLLMLEGHYHANVAYHNSLHAADVAQSTHVLLATPALEAVFTDLEILAALFASAIHDVDHPGVSNQFLINTNSELALMYNDASVLENHHLAVGFKLLQAENCDIFQNLSAKQRLSLRRMVIDMVLATDMSKHMNLLADLKTMVETKKVTSLGVLLLDNYSDRIQVLQNLVHCADLSNPTKPLPLYRQWTDRIMAEFFQQGDRERESGLDISPMCDKHTASVEKSQVGFIDYIAHPLWETWADLVHPDAQDLLDTLEDNREWYQSKIPRSPSDLTNPERDGPDRFQFELTLEEAEEEDEEEEEEGEETALAKEALELPDTELLSPEAGPDPGDLPLDNQRT

SEQ ID NO: 23 - DNA, 3070 bp, Homo sapiens
ggtggcgtcccaggcctacaacctgacctctgccctcatgcgcatcctcacgcgctcccgcgtgctcaacgaggagcccctgacactggcgggcgaggagatcgtggcccagggcaagcgctcggacccgcggagcctgctgtgctatggcggcgccccagggcctggctgccacttctccatcccctaggctttcagcagggccccggctaacctcagtgacgtggtgcagctcatctttctggtggactccaatccctttccctttggctatatcagcaactacaccgtctccaccaaggtggcctcgatggcgttccagacacaggccggcgcccagatccccatcgagcggctggcctcagagcgcgccatcaccgtgaaggtgcccaacaactcggactgggctgcccggggccaccgcagctctgccaactccgttgtggtccagccccaggcctccgtcggtgctgtggtcaccctggacagcagcaaccctgcggccgtgctgcatctgcagctcaactatacgctgctggacggccgctacctgtctgaggaacccgagccctacctggcagtctacctgcactcggagccccggcccaatgagcacaactgctcggctagcaggaggatccgcccagagtccctccagggtgccgaccaccggccctacaccttcttcatttccccggggaccagagacccagtggggagttaccgtctgaacctctccagccacttccgcctgtcggcgctggaggtgtccgtgggcctgtacacgtccctgtgccagtacttcagcgaggaggacgtggtgtggcggacagaggggctgctgcccctggaggagacctcgccccgccaggccgtctgcctcacccgccacctcaccgccttcggcgccagcctcttcgtgcccccaagccatgtacgctttgtgtttcctgagccgacagcggatgtaaactacatcgtcatgctgacatgtgctgtgtgcctggtgacctacatggtcatggccgccatcctgcacaagctggaccagttggatgccagccggggccgcgccatccccttctgtgggcagcggggccgcttcaagtacgagatcctcgtcaagacaggctggggccggggctcaggtaccacggcccacgtgggcatcatgctgtatggggtggacagccggagcggccaccggcacctggatggcgacagagccttccaccgcaacagcctggacatcttccggatcgccaccccgcacagcctgggtagcgtgtggaagatccgagtgtggcacgacaaagggctcagccctgcctggttcctgcagcacgtcatcatcagggacctgcagacggcacacagcaccttcttcctggtcaatgactggctttcggtggagacggaggccaacgggggcctggtggagaaggaggtgctggccgcgagtcacgcagccctgttgcgcttccggcgcctgctggtggctgagctgcagtgcggcttctttgacaagcacatctggctctccatatgggaccggccgcctcgtagctgtttcactcgcatccagagggccacctgctgcgttctcctcatctgcctcttcctgggcgccaacgccgtgtggtacggggctgttggtgactctgcctacagcacggggcatgtgtccaggctgagcccgctgagcgtcgacacagtcgctgttggcctggtgtccagcgtggttgtctatcccgtctacctggccatcctctttctcttctggatgtcccggagcaaggtggctgggagcccgagccccacacctgccgggcagcaggtgctggacatcgacagctgcctggactcgtccgtgctggacagctccttcctcacgttctcaggcctccacgctgaggttatcaatactctggctgaccatcgtcatcgtgggactgactttggtggaagtccttggttacttatcattactgtgtttctgagaagttataaatttgccatctccctctgcacaacttacctttgggttatcaatactctggctgaccatcgtcatcgtgggactgactttggtggaagtccttggttacttatcattactgtgtttctgagaagttataaatttgccatctccctctgcacaacttacctttgtgtgtctttcctgaagactatcttcccgtctcaaaatggacatgatggatccacggatgtacagcagagagccaggaggtccaaccgccgtagacaggaaggaattaaaattgtcctggaagacatctttactttatggagacaggtggaaaccaaggttcgagctaaaatccgtaagatgaaggtgacaacaaaagtcaaccgtcatgacaaaatcaatggaaagaggaagaccgccaaagaacatctgaggaaactaagcatgaaagaacgtgagcacggagaaaaggagaggcaggtgtcagaggcagaggaaaatgggaaattggatatgaaagaaatacacacctacatggaaatgtttcaacgtgcgcaagcgttgcggcggcgggcagaggactactacagatgcaaaatcaccccttctgcaagaaagcctctttgcaaccgggtcagaatggcggcagcggagcatcgtcattcttcaggattgccctgctggccctacctcacagctgaaactttaaaaaacaggatgggccaccagccacctcctccaactcaacaacattctataactgataactccctgagcctcaagacacctgcggagtgtctgctctatccccttccaccctcagcggatgataatctcaagacacctccgagtgtctgctcactccccttccaccctcagctccaccctcagcggatgataatctcaagacacctcccgagtgtgtctgctcactccccttccaccctcagctccaccctcagcggatgataatctcaagacacctcccaagtgtgtctgctcactccccttccaccctcagtggatgataatctgaagaaactaacgaagaataaataaataatataaaaataaaatgaa

SEQ ID NO: 24 - protein, 1 aa, Homo sapiens
M

SEQ ID NO: 25 - DNA, 6877 bp, Homo sapiens
gggtgtcgcaggagggaaggagcgaaccggagagcgtcgtcctgagaggagtgaaggcggcaaaatggcggaccgcttctcccgcttcaacgaagaccgagactttcagggtaatcactttgatcagtatgaggaaggacacttggaaattgaacaagcgtcacttgacaagcctatagaatcggataatattggacaccgcttactccagaaacatgggtggaagctgggccagggattgggaaaatctcttcaggggagaacagatcccattccaatcgttgtcaagtatgatgtcatgggcatgggtcgcatggaaatggagcttgattatgctgaagatgctaccgaacggcgccgtgtcctagaagtagaaaaagaagacacagaagagctgagacaaaagtacaaggattatgttgacaaagagaaggcaattgccaaagccttggaagacctcagagccaacttttattgtgaactgtgtgataagcaatatcagaaacatcaggaatttgataaccatatcaactcctatgatcatgcacacaagcagagattaaaagatctgaagcagagagagtttgctcgaaatgtctcttcaagatcccgcaaggatgagaaaaaacaggaaaaagcccttcggcggctccatgagttggcagagcaaagaaaacaagctgaatgtgcacctggaagtggtcccatgttcaaaccaaccacagtggctgtagatgaagaaggtggagaagatgataaagatgaatcagctacaaatagtggcacaggtgccactgcttcttgtggcctgggatctgaattctccacagataaaggaggccctttcactgcagtacaaatcactaataccactggactggcccaggctcctgggttagcctcccaaggcatcagctttggcattaagaataatctggggaccccattgcaaaaattgggagtgtcattttcttttgccaaaaaggctcctgtcaaactcgaatcaatagcatcagttttcaaggaccatgcggaggaagggacctctgaagatggaacaaaacccgatgagaagagttctgaccaaggactgcagaaggtaggagactctgatgggagcagtaatcttgatggtaaaaaagaggatgaagaccctcaggatggagggtcccttgcctcaacattatccaaattaaaaaggatgaaacgagaagaaggagctggggctacagagcctgagtattaccactacatccccccagcacactgcaaagtaaaacctaattttccctttctactttttatgagagccagtgaacaaatggatggtgataatactacacacccaaagaatgccccagagagtaaaaaaggcagttctcccaagcctaaaagctgcatcaaggcggcagcaagccaaggagcagaaaagacagttagtgaagtctctgagcagccgaaggaaaccagcatgaccgagccctcagaaccaggaagcaaagctgaggcaaagaaggccttaggaggggatgtaagtgatcagagtttagaaagtcatagtcagaaggtttcagagacccaaatgtgtgagtccaactcttctaaagaaacctctctggccaccccagcagggaaagaaagccaagaaggacccaaacatcctactggtcccttcttcccagttttgagcaaagatgaaagcactgccctccagtggccatcagaactattaattttcaccaaggcagaaccctccatttcatacagttgtaaccctttatattttgactttaaactttcaaggaacaaagatgccagaactaaaggaacagaaaaaccaaaggatataggaagctcctcaaaggaccatctccaaggcctagatcctggtgagccaaataaaagcaaggaagtgggcggagagaaaatagtacgttcctcaggaggcagaatggacgcacctgcttcagggtctgcctgtagcggcctgaacaagcaggagcctgggggtagccatgggtctgagacagaagacacagggagaagccttcccagcaagaaagaacgatctgggaagtcccaccggcacaaaaagaaaaagaagcacaaaaaatccagcaaacacaaacgtaaacacaaggctgacacagaagagaaaagctctaaggcagagtcaggggagaaatctaagaagcgcaagaaacgaaaacgaaagaagaataagtcatcagccccagcagattctgaacgaggacccaaaccagaaccccctgggagtggcagtcccgcaccaccaagaagaaggcggagagctcaagatgactcccagcggagatccctcccagctgaagaggggagcagtggcaaaaaggatgaaggtgggggtggtagcagctcccaagaccatggtgggaggaaacacaaaggtgaacttccaccttcatcctgccagcgaagagcaggcaccaaacggagcagccggtctagccatcggagccaacccagtagtggagatgaggatagtgatgatgcttcctcacaccggctgcaccagaagtctccatcccagtacagtgaggaagaagaagaggaagattcaggcagtgagcattcccgcagccgctcaaggtctggccggcgccattcctcgcatcgttcctcccggcgttcttactcaagtagctcagatgcctcttcagaccagagctgctatagtagacagcgcagttactctgatgacagctacagtgactacagtgacagatcacgaaggcactccaagcgctcccatgactcagatgactcagactatgccagctccaaacaccgatcaaaacggcacaaatattcatcttctgatgatgactatagcctcagttgcagccagtcccgaagccgatctcggagtcataccagagagcgctcaagatcccggggccgcagccgcagcagcagttgtagtcgtagtcgaagcaagcggagaagccgtagcaccacagcccacagctggcaacggagccggagctatagccgggaccgcagccgcagcaccaggagcccttcccagagatcaggctccaggaagagatcatggggtcacgagagccctgaggagaggcattctgggcgtcgggacttcattcgttctaagatctaccgctcccagtccccccactatttccgatcaggccggggagaaggtcctgggaagaaagatgatggcagaggagatgacagtaaagcaacaggtccaccttcccagaacagcaacattggcacaggaagagggtcagaaggtgactgcagtcctgaagacaagaactctgtcactgccaaactgctactggagaagatccagtcaaggaaagtggagaggaaacctagtgtgagtgaggaggtgcaggccacccctaataaagctgggcccaagctcaaggaccccccacaaggttactttgggcccaagctccccccatctcttggcaataagcctgtccttccactgatagggaagctcccagctacccgaaagcccaataagaagtgtgaagagtctggcttggaaaggggggaagagcaagaacagtcagagacagaagaggggcccccagggagtagtgatgccctatttgggcatcagttcccttcagaggaaacaactggccccttattagacccacccccagaagagtcaaagtctggagaagctactgctgatcaccctgtggctccactaggcaccccagcacattctgactgctaccctggggacccaaccatctcccataactacctccccgaccccagtgatggggacaccctggagtccctggatagcagcagtcagccaggccctgtggagtccagcttgctgcctatagcaccagaccttgagcatttccccagttatgcacctcccagtggggatcctagtattgagtcaacagatggggctgaggatgcttcactggcccccctggaaagccagcccatcaccttcacccctgaggagatggagaagtacagcaagctccagcaggctgctcagcaacacatccagcagcagcttctggccaagcaagtaaaggcctttccagcctcagctgccctggccccagccacaccagccctgcaacccatccacattcagcagccagctacagcctctgccacctccatcacaactgttcagcatgccatcctacaacatcatgctgccgcagctgctgccgccatcggcattcaccctcacccccatccccaaccacttgcccaggtgcatcatattccccagccccatctgacccccatttctttgtcccacctcactcactcaatcatccctggccaccctgccacctttctcgctagccatcccatccacatcattcccgcctcagccatccatcctgggcccttcacctttcaccctgtcccacatgctgccctctaccccaccctacttgctccacggcctgctgcagcagctgccactgcacttcaccttcacccactacttcaccccatcttctcaggtcaggacctgcaacatccccccagccatggcacgtgagttgggggatgggatcctaggtagggccaggggaggagacccataaatgttcccttgggggtgttgagccattaataccagcaagtagaagctgggatgggcagtgtctgacagccaaagaattgagttttggcttgcaggggtgggtttagatttgaagtttgctttcagtttactatcagggatttctttttcctgtcctcctctcaatttgtccctccctcttctgtgtttctaagctagggaacaccagtaagtgctacccacccctctgcagcaacatctccaaactgtcaagtttagataatcccctcctccctctgcttttttcctctgctcttcccttctgtaaattttaaaacattttcctcccctctggccagtgggttgtcaccagagcacttgctgtgggcccatctggtcttgccttctcagcgccacagggaaggccaagctgttctagtggtggaagtgccaccattttggggtagtatctttgaccatctttggtgacgttacgttatcccaggtgaggtggaaagcgtctcacctggaacctgatataactcaggctgcaattccatccagttcccacatcaacggagccacacatttggcactgttatcttggtatccctcatcccagaagaggcatctccatatcccagaaaagaagatcctatcatgaataaaagctgtatggcccagagaggagctcatgtgtctaaagtgaagggtatattttcttctgttgtgttgatgtttccttcttaatttataggatttttttaatgtaaaaaattgcactgaactctataaacgtaaatgctgctttttgtagctcatataaaaaaggttccatatttgtagtatactgcaataatattttttacatccagctctttaagtgatcctcgttctggtggctttgtgtaaatatgtttgccctagttgaattaagaaactctaaaggttataaaatgaaaacaaaaaataaaatatttgttttctgctagatgcaaaactgactaagcatgtatattttaccaaacttatgtattttttgaagttatgaactataaaatgttaaaacattttttgctgggacaaaatgttaagtaatttgcagtatgtagtgcccccagtattgggatttttgagctaatgggcagcagtcagctgggggcttctgagggatgctcatctttaacagtctccctcatgtacttttgctgttttacacagagaaacaggtagaccccacagaggagaaggaggggattcaacagctttattgtctggaagcagtgagatttggtgattgtctggggggattcctgggtttccctgggtaccttgttccaggcagtcagtccatttgccttcctagtacttagccccctctgacaattttttttttaatgtgccttttgggttggtagaaacggaagtagaagtaggctggaggatgagttgggacagtcttccttttgttgggaggtgagcacatttacagatattttgcttcatagtttccatgccctctgcccagctcagtttagacagtaaacgttccttgtttcttttctcccatgacactgacaagaggaattaccacctcagcctcttttgcccctcttcttgcctttcacccaggctctcagccctaattaacacactgacccaaaggtgcttgtgttgcaggtcccatctcctttgatgaggttaacaattcccactttggcattttcctaactattcgtgtggctagaattggttggttggtcacttgacaagaaaaaccatacttacctgggccaaggctctgttcctgccttcgcaaattctcaaaagagtaaagtttatgaaaagaaagtggcaggcaaacacaactcttgactgccctcccaccctcctacctgttcagtactcatctgattcagaagcatcacttcttggataactagcactggaaaaatgaaatcatctgtgtaagtgaagggactcatttttctttgctttcagcccatgtaaataaataatacagtattaacattttcgtgctgcttcccattagcttgtagattgagccatactctggctgcctctttgccttcctaggggcattttctttaacttccagaatagtgattttaaaagtaaaaataaaaataaaccttacttacaagcataacagattgtatttaactttatcacatatgatagagatatatatgctgtaaaatgagggaaaggaactttctaataaaccaatgatttgtggaaaaaaaaaaaaaaaaaaaa

SEQ ID NO: 26 - protein, 1502 aa, Homo sapiens
MADRFSRFNEDRDFQGNHFDQYEEGHLEIEQASLDKPIESDNIGHRLLQKHGWKLGQGLGKSLQGRTDPIPIVVKYDVMGMGRMEMELDYAEDATERRRVLEVEKEDTEELRQKYKDYVDKEKAIAKALEDLRANFYCELCDKQYQKHQEFDNHINSYDHAHKQRLKDLKQREFARNVSSRSRKDEKKQEKALRRLHELAEQRKQAECAPGSGPMFKPTTVAVDEEGGEDDKDESATNSGTGATASCGLGSEFSTDKGGPFTAVQITNTTGLAQAPGLASQGISFGIKNNLGTPLQKLGVSFSFAKKAPVKLESIASVFKDHAEEGTSEDGTKPDEKSSDQGLQKVGDSDGSSNLDGKKEDEDPQDGGSLASTLSKLKRMKREEGAGATEPEYYHYIPPAHCKVKPNFPFLLFMRASEQMDGDNTTHPKNAPESKKGSSPKPKSCIKAAASQGAEKTVSEVSEQPKETSMTEPSEPGSKAEAKKALGGDVSDQSLESHSQKVSETQMCESNSSKETSLATPAGKESQEGPKHPTGPFFPVLSKDESTALQWPSELLIFTKAEPSISYSCNPLYFDFKLSRNKDARTKGTEKPKDIGSSSKDHLQGLDPGEPNKSKEVGGEKIVRSSGGRMDAPASGSACSGLNKQEPGGSHGSETEDTGRSLPSKKERSGKSHRHKKKKKHKKSSKHKRKHKADTEEKSSKAESGEKSKKRKKRKRKKNKSSAPADSERGPKPEPPGSGSPAPPRRRRRAQDDSQRRSLPAEEGSSGKKDEGGGGSSSQDHGGRKHKGELPPSSCQRRAGTKRSSRSSHRSQPSSGDEDSDDASSHRLHQKSPSQYSEEEEEEDSGSEHSRSRSRSGRRHSSHRSSRRSYSSSSDASSDQSCYSRQRSYSDDSYSDYSDRSRRHSKRSHDSDDSDYASSKHRSKRHKYSSSDDDYSLSCSQSRSRSRSHTRERSRSRGRSRSSSCSRSRSKRRSRSTTAHSWQRSRSYSRDRSRSTRSPSQRSGSRKRSWGHESPEERHSGRRDFIRSKIYRSQSPHYFRSGRGEGPGKKDDGRGDDSKATGPPSQNSNIGTGRGSEGDCSPEDKNSVTAKLLLEKIQSRKVERKPSVSEEVQATPNKAGPKLKDPPQGYFGPKLPPSLGNKPVLPLIGKLPATRKPNKKCEESGLERGEEQEQSETEEGPPGSSDALFGHQFPSEETTGPLLDPPPEESKSGEATADHPVAPLGTPAHSDCYPGDPTISHNYLPDPSDGDTLESLDSSSQPGPVESSLLPIAPDLEHFPSYAPPSGDPSIESTDGAEDASLAPLESQPITFTPEEMEKYSKLQQAAQQHIQQQLLAKQVKAFPASAALAPATPALQPIHIQQPATASATSITTVQHAILQHHAAAAAAAIGIHPHPHPQPLAQVHHIPQPHLTPISLSHLTHSIIPGHPATFLASHPIHIIPASAIHPGPFTFHPVPHAALYPTLLAPRPAAAAATALHLHPLLHPIFSGQDLQHPPSHGT

SEQ ID NO: 27 - DNA, 1826 bp, Homo sapiens
ttttttttccgaacgcccgcagcagggtcagaagggaggtggtcgccctccgtcgtggtctggcgtgtattccgagccttggtgtctggcggtttccgagcgttggtgtctggcggtttccgagcgttggtgtctggcggtttccgaccgttggtgtctggcggtttccgaccgttggtgtctggcacgcgccaccctctcttgctttggttgcgccatgccgatgtaccagacaagaagacaagaaaatgatttgaggacagcttcaatcgcggtgtgaagaagaaagcagcaaaacgaccactgaaaacaacgccggtggcaaaatatccaaagaaagggtcccaagcggtacatcgtcatagccggaaacagtcagagccaccagccaatgatcttttcaatgctgcgaaagctgccaaaagtgacatgcagggatgtccttcctgagatccgtgctatctgcattgaggaaattgggtgttggatgcaaagctacagcacgtctttcctcaccgacagctatttaaaatatattggttggactctgcatgataagcaccgagaagtccgcgtgaagtgcgtgaaggctctgaaagggctgtacggtaaccgggacctgaccgcacgcctggagctcttcactggccgcttcaaggactggatggtttccatgatcgtggacagagagtacagtgtggcagtggaggccgtcagattactgatacttatccttaaacttttctaccctgagtgcgagataagaacgatgggtggaagagagcaacgccagagcccaggtgcccagaggactttcttccagcttctgctgtccttctttgtggagagcaagctccacgaccacgctgcttacttagtagacaacctgtgggactgtgcagggactcagctgaaggactgggagggtctgacaagcctgctgctggagaaggaccagagcacgtgccacatggagccagggccagggaccttccacctcctagggtgaaaccaggagagattgcttgcttcacttgtacaaggcaggaacggtggcatggggtgggggaaacttggagttggaaggtggctaatctttgattctatgtttttgatcctcctggcactccagacctgggtgatgtgcaggagagcacactgatagaaatccttgtgtccagtgcccagcaactcctgcctcagcctcccgagcagctgggactacaggcgcccgccaccacgcctggctaacttttttgtatttttagtagagacgggttttcaccgtgttggccaggatggtcttgatctcttgaccttgtgatccacctgcctcatcatcccaaagtgctgggattacaggcgtgagccactgcgcccagcatgttagacaatttttaattcatcctctctgtgctgttgttttctcagctgtgaaaggaatattctggtggggacaaggttacagagttgctgagagggtctcatgacatgaaggtactggccttggcacagtgcctgggggggcggggactccgcacatgcctgtgatgtcacagttactgtcagttcacagtgaaccttccctccttttcctgttgactttcccacactcctgtaaccctccctccctcccttcttcctctctctctctctcactcacgcacacgcacacacacacacacacacacacacacacactccattcactgtctccatgactctggagtaaactaacgtctcgagttgccattggaagccccattgtcctcattttgttttgttttgtttgtttgagacggggtctcgctctgtcccccaggctg

SEQ ID NO: 28 - protein, 205 aa, Homo sapiens
MIFSMLRKLPKVTCRDVLPEIRAICIEEIGCWMQSYSTSFLTDSYLKYIGWTLHDKHREVRVKCVKALKGLYGNRDLTARLELFTGRFKDWMVSMIVDREYSVAVEAVRLLILILKLFYPECEIRTMGGREQRQSPGAQRTFFQLLLSFFVESKLHDHAAYLVDNLWDCAGTQLKDWEGLTSLLLEKDQSTCHMEPGPGTFHLLG

SEQ ID NO: 29 - DNA, 10394 bp, Homo sapiens
gccgccatcttgcttctttttctcgctcgctcgctccccctcggaaagctgcgaaagtgctttggcggtttgtccatccgcagcttcggcttttccagtctggtggcccttccggccacccctttaaccccagctttccctcccccttctttcgatcagagatcggcggagaccctcgaagtgcgcaaacttgacactcaccctgaccggactggggttttaaggggtgtggcaggaggttttggactcgatgagtttccaccgaaatgtcggagaagtcaggccagagcacaaaagcaaaggatgggaaaaagtatgcaacactcagtttatttaatacttacaaggggaaatcattagaaacacagaaaaccacagctcgacatggattacagagtcttggaaaagtcggtatttcacggcgtatgcctccacctgctaacctcccaagtcttaaagcagaaaacaaaggcaatgatcctaatgtaaacattgtacctaaagatggcacagggtgggcatcaaaacaagagcaacatgaagaagaaaaaacaccagaagtgccaccagcacagccaaaacctggggttgcagctcccccagaagtagcacctgctcccaaatcatgggccagtaacaagcaaggtgggcaaggagatggaatccaagtgaatagtcagtttcagcaagaatttcccagcctgcaggcagctggggatcaggaaaaaaaagaaaaggaaacaaatgatgacaactatggacctggacccagtttacgtccaccaaatgttgcttgttggagagatggtggtaaggctgctggctcaccttcgtcatctgatcaagatgaaaagctccctggccaggatgaaagcacagctggaacatcagagcaaaatgatatcctcaaagtggtggaaaagaggatagcttgtggtcctccacaggctaaactgaatggacagcaggctgctctcgcttcccagtatagagctatgatgcctccttatatgttccaacagtatccgaggatgacatatcctcctctacatggtcccatgagattcccaccttctttatctgaaacaaacaaaggccttcgaggaagaggcccacctccttcatgggcctctgagcctgaacgcccatccattcttagtgcatcagaactgaaggagcttgataaatttgataacctagatgctgaagctgatgaaggttgggcaggtgctcagatggaagtagattatacagagcaactgaatttcagtgatgatgatgaacaaggaagtaacagtcctaaagagaataacagtgaggatcaaggttcaaaagcctctgaaaacaacgaaaacaaaaaagaaacagatgaagtttccaacactaaatcatcttcccaaatacctgcccaaccatcagtagcaaaagttccctatgggaaaggaccttcatttaatcaggaacgtggaacatcttcacatctgccaccacctccaaagttgcttgcacagcagcatccacctccagatcgacaggcagtacctggaagaccaggcccctttccctccaagcagcaagtagctgatgaagatgaaatatggaagcaaagacgaagacaacaatcagaaatttctgcagcagtagaacgtgctcgtaaacggcgtgaagaggaagagcgaagaatggaagaacaaaggaaggcagcttgtgcggagaaactgaaacgattggatgagaagcttggcatcctggaaaaacaaccatctccagaggaaattagggaaagggagcgagaaaaagaacgggagcgtgagaaagaacttgaaaaagaacaagaacaggagcgagagaaggagagggaaaaagacagagagagacagcaggaaaaggagaaagagctggagaaggagcaggaaaaacaaagagaaatggagaaagaaagaaagcaagaaaaagaaaaagaactagaacggcagaaagaaaaggaaaaagaactacaaaagatgaaagaacaagaaaaggaatgtgagctggagaaggaaagggaaaaattagaggagaaaattgaacccagagaacctaatttagagcccatggtagaaaaacaagaaagtgaaaacagctgtaataaagaggaggaacccgttttcactagacaagacagcaatcgcagtgaaaaggaagccacaccagtggtgcatgaaacagaaccagaatcagggtctcaacctcggccggctgtattatctggctatttcaaacagtttcagaagtctttacctccacgattccagcggcagcaggaacagatgaaacagcagcagtggcagcagcagcaacagcaaggtgtacttccacagactgttccttcacaaccgtccagtagtactgtccctcctccaccacacagacctctttatcagcctatgcagcctcatcctcagcatttggcttctatgggttttgatccaaggtggctcatgatgcagtcctacatggatcctcgaatgatgtcaggaagacctgctatggatattccacccattcatcctggaatgattcctcctaaaccattaatgagaagagaccagatggaagggtcaccgaacagttctgagtcatttgagcatatagctcgatctgcaagagatcacgcaatttccctttctgagcctcgtatgctgtgggggtcagatccctatcctcatgctgagcctcaacaagcaactactcccaaagcaacagaagagcctgaggatgtaaggtctgaagctgcgttggaccaggaacagattactgctgcttattctgtagaacataatcaattagaggctcacccaaaggcagactttatcagagaatcaagtgaggcacaagtacaaaagtttttaagcagatctgtggaagatgttagacctcaccatactgatgcaaataatcagtctgcttgttttgaagcacctgatcaaaagaccttatccgctcctcaagaggagcggatttcagctgtagaaagtcagccttcccggaaaagaagtgtttcccatggatctaaccatacgcaaaaaccagacgagcagagaagtgaaccatctgcaggcattcctaaagtaaccagcagatgcattgattcaaaagaaccaatagaaaggccagaggagaaaccaaaaaaggaaggctttatacgatcttctgaaggaccaaaacctgaaaaagtatataaatctaaatcagaaactcgttggggcccacgaccaagctctaacagaagggaagaagttaatgatagacctgtgagaagatcaggtcccattaaaaaacctgtacttagagatatgaaagaggaacgggaacagaggaaggagaaagaaggagaaaaggccgaaaaggtcactgaaaaagtagttgtaaagcctgaaaagacggaaaagaaggatcttcctcctcccccaccaccacctcagccaccagcaccaattcagccacagtcagttccaccaccaattcaaccagaagcagagaaatttccttcaacagaaactgcaactttggctcaaaaaccatctcaggatactgagaagcctctggaacctgtgagtactgttcaggtagagcctgcagttaagactgtaaaccaacagactatggcagcaccagtagtcaaagaagaaaaacaacctgagaaagtcatcagcaaagaccttgttatagagaggcctcgaccagattcaagaccagcagttaaaaaagaatcaactttgcctcccaggacctattggaaagaagctagagagagagattggtttccagatcaaggatacagaggtcgaggccgaggtgaatattactccagaggtcgaagctatagaggttcttatggagggcgtggcaggggtggtaggggacacactcgagattatcctcagtatagagacaataagccaagagcagagcatataccctcagggcctctcagacagcgagaagaaagtgaaacacggagtgagagctctgattttgaagttgtccccaaaagaagacgacagcggggttcagagactgacacagacagtgaaattcatgaaagtgcaagtgacaaggacagtttaagtaaaggcaaacttcccaaaagagaggaacggcctgaaaacaaaaaacctgtaaagcctcattcttctttcaagcctgataatcatgttcgaatagataatagactgctagaaaagccttatgtaagggatgacgataaagctaaaccaggctttcttcctaaaggagagcctacaaggagaggcagagggggaacattcaggcgtggtggaagggatcctggaggccgtccatcacgcccttccactttacgaagaccagcttatcgggacaatcagtggaacccaaggcagtcagaagttcctaaaccagaagatggagagccgccaagaagacatgagcagtttattcctatagcagcagataaacgacctccaaaatttgagcgaaaatttgacccagctagagaaaggcctcgaaggcagcgtcctactcgaccaccaaggcaagacaagccacctcgatttagacggctaagagagagggaggctgcttcaaaatcaaatgaggtggtagcagtgcccacaaatggcacagttaataatgtggctcaagaaccagttaatactcttggggatatttccgggaataagacaccagatttatctaatcagaactcttcagatcaggcaaatgaagaatgggaaacagcttctgaaagcagtgatttcaatgagaggcgagagagggatgaaaaaaaaaatgctgacttgaatgcacaaacagttgtaaaggttggagagaatgttctacctccaaagagggaaattgcaaagagaagtttttctagtcagagaccagtagatcgtcagaatcgacgtggcaacaatggtccacccaaatcaggaaggaatttctcaggtcctagaaatgaaaggagaagtggcccaccatcaaaaagtgggaagagagggccatttgatgaccagcctgcaggcacaactggggttgacctcatcaatggcagctctgcacaccatcaggaaggagtacctaatggtacaggacaaaagaactccaaagattctactgggaaaaaaagagaagaccccaaaccaggccctaaaaaaccaaaagagaaagtggatgctctatcacagtttgatctcaacaattatgcaagtgttgttataattgatgatcatcctgaagtaacagtaattgaagatccccagtcaaatttgaatgatgatggttttactgaagtggtatccaaaaaacaacaaaaacgtttacaggatgaagaacgccgaaagaaggaagaacaagtcatacaggtctggaacaaaaagaatgcaaatgaaaaaggaagaagccagacttctaagcttcctccaagatttgccaaaaaacaggctacagggatccagcaagcacagtcttcagcctcagttccacctctagcttcggctccacttccaccttcaacctcagcttcagttccagcctcaacctcagctccacttccggcaaccttaactccagttccagcctcaacctcagctccggttccagcctcaactttagctccagttctggcctcaacctcagctccagttccagcctcacccttagctccagtttcagcctcagcctcagtctcagcttcagttccagcctctacttcagctgcagctataacctcttcttcagctccagcctcagccccagctccaacccccatccttgcctcagtttcaaccccagcttctgtcaccattcttgcctcagcctcaattcccattcttgcttcagccctagcatcaacttcagctccaacgccagccccagcagcctcttccccagctgccccagtcatcacagcaccaactatcccagcctcagccccaactgcctcagtcccacttgcccctgcctcagcttcagccccagccccagcccctaccccagtctcagccccaaatcctgccccacctgccccagcccagactcaggcacagacccacaaaccagtccagaatccactacagactacatctcagtcttcaaaacaaccaccaccatcaattaggctgccttcagctcaaacacctaatggcacagattatgtagcctcaggaaaatccatccagaccccacagtcacatggcactctgacagctgaattatgggataacaaggtggccccaccagctgtgctgaatgatatctctaagaaattaggtcccattagtccaccacagccaccttcagtcagtgcatggaataagcccttaacatcgtttggatcagctccttcatcagagggagcgaagaatggtcaagaaagtggactcgaaattggaactgacacaattcagtttggtgctccagcctcaaatggaaatgaaaatgaagttgttcctgtgctttcggaaaaatctgctgacaaaatacctgaacctaaagaacagcggcagaagcagccacgagcaggacctatcaaagcccagaagcttccagatttgagtccagtagaaaacaaagaacacaaacctggtcccattggaaaggaacgttcattaaaaaatagaaaagtaaaagatgcccaacaggtggagccagaaggacaagagaaaccaagcccagctacagtcagaagcacagatcctgtcacgacaaaggagactaaagcagtctcagaaatgtctactgaaataggaacaatgatctcggtatcatctgcagaatatggtactaatgcaaaggagtctgtaacagactatactacaccctcttcttctttgcctaacaccgtggctactaataatacaaagatggaggatactttggttaataatgtgcccctgcccaacacccttcccctccctaagagggagactatacaacagagctccagcctaacttcagttcctcccactactttcagcctcaccttcaagatggagtctgcacgcaaagcatgggagaattctccaaatgtaagggaaaaggggtctccagtaacttccacagcacctccaattgcaactggagtcagcagtagtgccagtggaccaagcactgctaattacaattcgttctcaagtgcatccatgccccagattcctgttgcttcagtcactcctacagcatcactatcaggagctggtacatacactacctcttctttgagcacaaaatctacaaccacatcggaccctccaaatatttgtaaagtgaaacctcagcagttacagacaagcagcctgccttctgcaagtcatttttcacagttaagctgtatgccttcccttattgcccagcagcaacagaatccgcaagtttatgtgtctcagtctgcagcagctcaaatcccagccttctatatggacacaagtcatttattcaatacccaacatgcacgattggctccgccatccttggctcaacaacagggtttccaaccaggtctctctcagccaacttcagttcagcagattccaatccctatttatgcaccactgcaagggcagcatcaagcccaactgagtttgggggctggccctgctgtttcccaggctcaggaattgttcagctcctcacttcaaccatatagatctcagccagcttttatgcaaagcagtttatcccagccatctgtggtcctttctggtactgctattcacaactttccaactgtccaacaccaagaacttgccaaggcacaatccggtcttgcctttcagcaaacatcaaatactcagcccattcctatattgtatgaacatcaactggggcaggcatcaggactaggaggttcccagctgattgacacacatcttctccaggccagagcaaatcttacccaggcctcaaatctttattctggacaagtacaacagcctggtcagacaaatttttataacactgcccagtcaccaagtgctctccagcaggttacagtacctttaccagcatcgcagctttccttgcctaattttggatctacagggcaacctctaattgctttgcctcagactcttcagcccccattacagcataccactccccaagcacaggctcagagtctgagtcgtcctgcacaagtaagccagcctttcagaggattaattcctgctggaacacagcatagcatgattgcaaccacaggaaaaatgtctgaaatggaactaaaagcctttggaagtggcattgatataaaaccaggcacacctccaatcgctggtagaagcaccacaccaacatctagtcccttccgggctacttctacaagtccgaacagccagtccagcaaaatgaacagcattgtctaccagaagcagttccagtcagcccctgccactgtgagaatgacacaaccatttcctacacagtttgcaccccaggcaaagcagagagcagaggttcttcagtccacgcaacggttcttctctgaacagcaacagagcaaacagataggaggaggcaaagcccagaaagtggacagtgattcaagtaaacctcctgaaacactgaccgaccctcctggggtctgtcaggaaaaagtagaagaaaagccaccccctgcaccctccatagccaccaaacctgttagaactggaccaatcaaacctcaggcgatcaaaaccgaagaaacaaaatcttaaaggctatggtttattgcaggggattgggaggggggcgggaaaacatggagaattaagtcagataatgctggcagccaaaggggcaaaatggcctgtgacattatcctgttcagagcttggagatgtacaagggacataggagcaatttacactgacacacagctgctgtaccagtgaaaacgaggctttgcaagcttgtacctactatataacatgtgcttggttgatggccatgcatcttcagtcagaatttatatataaatgtatgcacccatttttttgagtgcatataatttagacctaaaaatccttatgattagatgaaacaccaaaaatataaggaaaataacacagcagaggaatagctcagcctgaacagtgtgatggtcccagctactacatcagatgcggtttttttgctcccttatgttcttcggatatggttatggcatttgtaggcttggaggtaaagaactgaagataactggtgctggatagaggagccttattttttattatggcagcttgctatttttataacatggtgattgagttgaacacaatcaaagtacagtagtaactgatgtccccttcttcctggatgaatgagcagataaatattgatgtcagcatccttgaaccatatcaaagtgagcagtgtttggctactgcttctatttgaaatggtgctgtgttttggttgtggtctgaagctttgaagcgctacttagcatctcctttcttccatggagctctcacgattcaaacatgacagatttggtaaaatgctggttaggttgagtcttccttgcccccactcagtcatctttgtatgaatcccatgatttgggggtttttttctttttttttttataccagtttttagctggtgtttatgaagaacagtgagtacctagaactgtgccactaattaaaggaaatcctaagaaggtgcatttctttacagagctgtgtcatgccatcctttgggccctctgctggaaaagtagaatcaagtctcaaataatgcctttttaattgtatcctctagtattatagatataggacagtactgtatcatacctctgtgaatgtaaaatatcttgtacctgctttatgatacgtagtagtgaccgtgctttatcagagctgtttttaatgatgttattctagaatgttttctttccagatgatgattcagaagctaattttaaaaaacggtgccaggtaccacaacagtaacagaactttgcaattttctggggttttgttttttacctttttccccccttttttttaaatggagtgtgctggatgtctctataattttattcagatgactgcagaacctggaaaagctgttgctgctattgatgcataacatactgctattggtctttttatataaatatatatatatatatacatatatatatataatttgaatttttggaaactttagctgtgctgtcaactttggaaaaagtatcccggtttactgtgttgagttggcattgtacagaaattaacagccatattggtctagaaacgttaaacttaatttttttccatttgtacaggggtaacgcactgtattaaatatgtaaggtcttatctacatgggtttgattacagaaactaataaagtattctctaaataatgaaaaaaaaaaa

SEQ ID NO: 30 - protein, 2817 aa, Homo sapiens
MSEKSGQSTKAKDGKKYATLSLFNTYKGKSLETQKTTARHGLQSLGKVGISRRMPPPANLPSLKAENKGNDPNVNIVPKDGTGWASKQEQHEEEKTPEVPPAQPKPGVAAPPEVAPAPKSWASNKQGGQGDGIQVNSQFQQEFPSLQAAGDQEKKEKETNDDNYGPGPSLRPPNVACWRDGGKAAGSPSSSDQDEKLPGQDESTAGTSEQNDILKVVEKRIACGPPQAKLNGQQAALASQYRAMMPPYMFQQYPRMTYPPLHGPMRFPPSLSETNKGLRGRGPPPSWASEPERPSILSASELKELDKFDNLDAEADEGWAGAQMEVDYTEQLNFSDDDEQGSNSPKENNSEDQGSKASENNENKKETDEVSNTKSSSQIPAQPSVAKVPYGKGPSFNQERGTSSHLPPPPKLLAQQHPPPDRQAVPGRPGPFPSKQQVADEDEIWKQRRRQQSEISAAVERARKRREEEERRMEEQRKAACAEKLKRLDEKLGILEKQPSPEEIREREREKEREREKELEKEQEQEREKEREKDRERQQEKEKELEKEQEKQREMEKERKQEKEKELERQKEKEKELQKMKEQEKECELEKEREKLEEKIEPREPNLEPMVEKQESENSCNKEEEPVFTRQDSNRSEKEATPVVHETEPESGSQPRPAVLSGYFKQFQKSLPPRFQRQQEQMKQQQWQQQQQQGVLPQTVPSQPSSSTVPPPPHRPLYQPMQPHPQHLASMGFDPRWLMMQSYMDPRMMSGRPAMDIPPIHPGMIPPKPLMRRDQMEGSPNSSESFEHIARSARDHAISLSEPRMLWGSDPYPHAEPQQATTPKATEEPEDVRSEAALDQEQITAAYSVEHNQLEAHPKADFIRESSEAQVQKFLSRSVEDVRPHHTDANNQSACFEAPDQKTLSAPQEERISAVESQPSRKRSVSHGSNHTQKPDEQRSEPSAGIPKVTSRCIDSKEPIERPEEKPKKEGFIRSSEGPKPEKVYKSKSETRWGPRPSSNRREEVNDRPVRRSGPIKKPVLRDMKEEREQRKEKEGEKAEKVTEKVVVKPEKTEKKDLPPPPPPPQPPAPIQPQSVPPPIQPEAEKFPSTETATLAQKPSQDTEKPLEPVSTVQVEPAVKTVNQQTMAAPVVKEEKQPEKVISKDLVIERPRPDSRPAVKKESTLPPRTYWKEARERDWFPDQGYRGRGRGEYYSRGRSYRGSYGGRGRGGRGHTRDYPQYRDNKPRAEHIPSGPLRQREESETRSESSDFEVVPKRRRQRGSETDTDSEIHESASDKDSLSKGKLPKREERPENKKPVKPHSSFKPDNHVRIDNRLLEKPYVRDDDKAKPGFLPKGEPTRRGRGGTFRRGGRDPGGRPSRPSTLRRPAYRDNQWNPRQSEVPKPEDGEPPRRHEQFIPIAADKRPPKFERKFDPARERPRRQRPTRPPRQDKPPRFRRLREREAASKSNEVVAVPTNGTVNNVAQEPVNTLGDISGNKTPDLSNQNSSDQANEEWETASESSDFNERRERDEKKNADLNAQTVVKVGENVLPPKREIAKRSFSSQRPVDRQNRRGNNGPPKSGRNFSGPRNERRSGPPSKSGKRGPFDDQPAGTTGVDLINGSSAHHQEGVPNGTGQKNSKDSTGKKREDPKPGPKKPKEKVDALSQFDLNNYASVVIIDDHPEVTVIEDPQSNLNDDGFTEVVSKKQQKRLQDEERRKKEEQVIQVWNKKNANEKGRSQTSKLPPRFAKKQATGIQQAQSSASVPPLASAPLPPSTSASVPASTSAPLPATLTPVPASTSAPVPASTLAPVLASTSAPVPASPLAPVSASASVSASVPASTSAAAITSSSAPASAPAPTPILASVSTPASVTILASASIPILASALASTSAPTPAPAASSPAAPVITAPTIPASAPTASVPLAPASASAPAPAPTPVSAPNPAPPAPAQTQAQTHKPVQNPLQTTSQSSKQPPPSIRLPSAQTPNGTDYVASGKSIQTPQSHGTLTAELWDNKVAPPAVLNDISKKLGPISPPQPPSVSAWNKPLTSFGSAPSSEGAKNGQESGLEIGTDTIQFGAPASNGNENEVVPVLSEKSADKIPEPKEQRQKQPRAGPIKAQKLPDLSPVENKEHKPGPIGKERSLKNRKVKDAQQVEPEGQEKPSPATVRSTDPVTTKETKAVSEMSTEIGTMISVSSAEYGTNAKESVTDYTTPSSSLPNTVATNNTKMEDTLVNNVPLPNTLPLPKRETIQQSSSLTSVPPTTFSLTFKMESARKAWENSPNVREKGSPVTSTAPPIATGVSSSASGPSTANYNSFSSASMPQIPVASVTPTASLSGAGTYTTSSLSTKSTTTSDPPNICKVKPQQLQTSSLPSASHFSQLSCMPSLIAQQQQNPQVYVSQSAAAQIPAFYMDTSHLFNTQHARLAPPSLAQQQGFQPGLSQPTSVQQIPIPIYAPLQGQHQAQLSLGAGPAVSQAQELFSSSLQPYRSQPAFMQSSLSQPSVVLSGTAIHNFPTVQHQELAKAQSGLAFQQTSNTQPIPILYEHQLGQASGLGGSQLIDTHLLQARANLTQASNLYSGQVQQPGQTNFYNTAQSPSALQQVTVPLPASQLSLPNFGSTGQPLIALPQTLQPPLQHTTPQAQAQSLSRPAQVSQPFRGLIPAGTQHSMIATTGKMSEMELKAFGSGIDIKPGTPPIAGRSTTPTSSPFRATSTSPNSQSSKMNSIVYQKQFQSAPATVRMTQPFPTQFAPQAKQRAEVLQSTQRFFSEQQQSKQIGGGKAQKVDSDSSKPPETLTDPPGVCQEKVEEKPPPAPSIATKPVRTGPIKPQAIKTEETKS

SEQ ID NO: 31 - DNA, 5589 bp, Homo sapiens
ggcgggggaggcgccgggaagtcgacggcgccggcggctcctgcaggaggccactgtctgcagctcccgtgaagatgtccactccagacccacccctgggcggaactcctcggccaggtccttccccgggccctggcccttcccctggagccatgctgggccctagcccgggtccctcgccgggctccgcccacagcatgatggggcccagcccagggccgccctcagcaggacaccccatccccacccaggggcctggagggtaccctcaggacaacatgcaccagatgcacaagcccatggagtccatgcatgagaagggcatgtcggacgacccgcgctacaaccagatgaaaggaatggggatgcggtcagggggccatgctgggatggggcccccgcccagccccatggaccagcactcccaaggttacccctcgcccctgggtggctctgagcatgcctctagtccagttccagccagtggcccgtcttcggggccccagatgtcttccgggccaggaggtgccccgctggatggtgctgacccccaggccttggggcagcagaaccggggcccaaccccatttaaccagaaccagctgcaccagctcagagctcagatcatggcctacaagatgctggccagggggcagcccctccccgaccacctgcagatggcggtgcagggcaagcggccgatgcccgggatgcagcagcagatgccaacgctacctccaccctcggtgtccgcaacaggacccggccctggccctggccctggccccggcccgggtcccggcccggcacctccaaattacagcaggcctcatggtatgggagggcccaacatgcctcccccaggaccctcgggcgtgccccccgggatgccaggccagcctcctggagggcctcccaagccctggcctgaaggacccatggcgaatgctgctgcccccacgagcacccctcagaagctgattcccccgcagccaacgggccgcccttcccccgcgccccctgccgtcccacccgccgcctcgcccgtgatgccaccgcagacccagtcccccgggcagccggcccagcccgcgcccatggtgccactgcaccagaagcagagccgcatcacccccatccagaagccgcggggcctcgaccctgtggagatcctgcaggagcgcgagtacaggctgcaggctcgcatcgcacaccgaattcaggaacttgaaaaccttcccgggtccctggccggggatttgcgaaccaaagcgaccattgagctcaaggccctcaggctgctgaacttccagaggcagctgcgccaggaggtggtggtgtgcatgcggagggacacagcgctggagacagccctcaatgctaaggcctacaagcgcagcaagcgccagtccctgcgcgaggcccgcatcactgagaagctggagaagcagcagaagatcgagcaggagcgcaagcgccggcagaagcaccaggaatacctcaatagcattctccagcatgccaaggatttcaaggaatatcacagatccgtcacaggcaaaatccagaagctgaccaaggcagtggccacgtaccatgccaacacggagcgggagcagaagaaagagaacgagcggatcgagaaggagcgcatgcggaggctcatggctgaagatgaggaggggtaccgcaagctcatcgaccagaagaaggacaagcgcctggcctacctcttgcagcagacagacgagtacgtggctaacctcacggagctggtgcggcagcacaaggctgcccaggtcgccaaggagaaaaagaagaaaaagaaaaagaagaaggcagaaaatgcagaaggacagacgcctgccattgggccggatggcgagcctctggacgagaccagccagatgagcgacctcccggtgaaggtgatccacgtggagagtgggaagatcctcacaggcacagatgcccccaaagccgggcagctggaggcctggctcgagatgaacccggggtatgaagtagctccgaggtctgatagtgaagaaagtggctcagaagaagaggaagaggaggaggaggaagagcagccgcaggcagcacagcctcccaccctgcccgtggaggagaagaagaagattccagatccagacagcgatgacgtctctgaggtggacgcgcggcacatcattgagaatgccaagcaagatgtcgatgatgaatatggcgtgtcccaggcccttgcacgtggcctgcagtcctactatgccgtggcccatgctgtcactgagagagtggacaagcagtcagcgcttatggtcaatggtgtcctcaaacagtaccagatcaaaggtttggagtggctggtgtccctgtacaacaacaacctgaacggcatcctggccgacgagatgggcctggggaagaccatccagaccatcgcgctcatcacgtacctcatggagcacaaacgcatcaatgggcccttcctcatcatcgtgcctctctcaacgctgtccaactgggcgtacgagtttgacaagtgggccccctccgtggtgaaggtgtcttacaagggatccccagcagcaagacgggcctttgtcccccagctccggagtgggaagttcaacgtcttgctgacgacgtacgagtacatcatcaaagacaagcacatcctcgccaagatccgttggaagtacatgattgtggacgaaggtcaccgcatgaagaaccaccactgcaagctgacgcaggtgctcaacacgcactatgtggcaccccgccgcctgctgctgacgggcacaccgctgcagaacaagcttcccgagctctgggcgctgctcaacttcctgctgcccaccatcttcaagagctgcagcaccttcgagcagtggtttaacgcaccctttgccatgaccggggaaaaggtggacctgaatgaggaggaaaccattctcatcatccggcgtctccacaaagtgctgcggcccttcttgctccgacgactcaagaaggaagtcgaggcccagttgcccgaaaaggtggagtacgtcatcaagtgcgacatgtctgcgctgcagcgagtgctctaccgccacatgcaggccaagggcgtgctgctgactgatggctccgagaaggacaagaagggcaaaggcggcaccaagaccctgatgaacaccatcatgcagctgcggaagatctgcaaccacccctacatgttccagcacatcgaggagtccttttccgagcacttggggttcactggcggcattgtccaagggctggacctgtaccgagcctcgggtaaatttgagcttcttgatagaattcttcccaaactccgagcaaccaaccacaaagtgctgctgttctgccaaatgacctccctcatgaccatcatggaagattactttgcgtatcgcggctttaaatacctcaggcttgatggaaccacgaaggcggaggaccggggcatgctgctgaaaaccttcaacgagcccggctctgagtacttcatcttcctgctcagcacccgggctggggggctcggcctgaacctccagtcggcagacactgtgatcatttttgacagcgactggaatcctcaccaggacctgcaagcgcaggaccgagcccaccgcatcgggcagcagaacgaggtgcgtgtgctccgcctctgcaccgtcaacagcgtggaggagaagatcctagctgcagccaagtacaagctcaacgtggaccagaaggtgatccaggccggcatgttcgaccagaagtcctccagccatgagcggcgcgccttcctgcaggccatcctggagcacgaggagcaggatgagagcagacactgcagcacgggcagcggcagtgccagcttcgcccacactgcccctccgccagcgggcgtcaaccccgacttggaggagccacctctaaaggaggaagacgaggtgcccgacgacgagaccgtcaaccagatgatcgcccggcacgaggaggagtttgatctgttcatgcgcatggacctggaccgcaggcgcgaggaggcccgcaaccccaagcggaagccgcgcctcatggaggaggacgagctcccctcgtggatcatcaaggacgacgcggaggtggagcggctgacctgtgaggaggaggaggagaagatgttcggccgtggctcccgccaccgcaaggaggtggactacagcgactcactgacggagaagcagtggctcaagaaaattacaggaaaagatatccatgacacagccagcagtgtggcacgtgggctacaattccagcgtggccttcagttctgcacacgtgcgtcaaaggccatcgaggagggcacgctggaggagatcgaagaggaggtccggcagaagaaatcatcacggaagcgcaagcgagacagcgacgccggctcctccaccccgaccaccagcacccgcagccgcgacaaggacgacgagagcaagaagcagaagaagcgcgggcggccgcctgccgagaaactctcccctaacccacccaacctcaccaagaagatgaagaagattgtggatgccgtgatcaagtacaaggacagcagcagtggacgtcagctcagcgaggtcttcatccagctgccctcgcgaaaggagctgcccgagtactacgagctcatccgcaagcccgtggacttcaagaagataaaggagcgcattcgcaaccacaagtaccgcagcctcaacgacctagagaaggacgtcatgctcctgtgccagaacgcacagaccttcaacctggagggctccctgatctatgaagactccatcgtcttgcagtcggtcttcaccagcgtgcggcagaaaatcgagaaggaggatgacagtgaaggcgaggagagtgaggaggaggaagagggcgaggaggaaggctccgaatccgaatctcggtccgtcaaagtgaagatcaagcttggccggaaggagaaggcacaggaccggctgaagggcggccggcggcggccgagccgagggtcccgagccaagccggtcgtgagtgacgatgacagtgaggaggaacaagaggaggaccgctcaggaagtggcagcgaagaagactgagccccgacattccagtctcgaccccgagcccctcgttccagagctgagatggcataggccttagcagtaacgggtagcagcagatgtagtttcagacttggagtaaaactgtataaacaaaagaatcttccatatttatacagcagagaagctgtaggactgtttgtgactggccctgtcctggcatcagtagcatctgtaacagcattaactgtcttaaagagagagagagagaattccgaattggggaacacacgatacctgtttttcttttccgttgctggcagtactgttgcgccgcagtttggagtcactgtagttaagtgtggatgcatgtgcgtcaccgtccactcctcctactgtattttattggacaggtcagactcgccgggggcccggcgagggtatgtcagtgtcactggatgtcaaacagtaataaattaaaccaacaacaaaacgcacagccaaaaaaaaa

SEQ ID NO: 32 - protein, 1679 aa, Homo sapiens
MSTPDPPLGGTPRPGPSPGPGPSPGAMLGPSPGPSPGSAHSMMGPSPGPPSAGHPIPTQGPGGYPQDNMHQMHKPMESMHEKGMSDDPRYNQMKGMGMRSGGHAGMGPPPSPMDQHSQGYPSPLGGSEHASSPVPASGPSSGPQMSSGPGGAPLDGADPQALGQQNRGPTPFNQNQLHQLRAQIMAYKMLARGQPLPDHLQMAVQGKRPMPGMQQQMPTLPPPSVSATGPGPGPGPGPGPGPGPAPPNYSRPHGMGGPNMPPPGPSGVPPGMPGQPPGGPPKPWPEGPMANAAAPTSTPQKLIPPQPTGRPSPAPPAVPPAASPVMPPQTQSPGQPAQPAPMVPLHQKQSRITPIQKPRGLDPVEILQEREYRLQARIAHRIQELENLPGSLAGDLRTKATIELKALRLLNFQRQLRQEVVVCMRRDTALETALNAKAYKRSKRQSLREARITEKLEKQQKIEQERKRRQKHQEYLNSILQHAKDFKEYHRSVTGKIQKLTKAVATYHANTEREQKKENERIEKERMRRLMAEDEEGYRKLIDQKKDKRLAYLLQQTDEYVANLTELVRQHKAAQVAKEKKKKKKKKKAENAEGQTPAIGPDGEPLDETSQMSDLPVKVIHVESGKILTGTDAPKAGQLEAWLEMNPGYEVAPRSDSEESGSEEEEEEEEEEQPQAAQPPTLPVEEKKKIPDPDSDDVSEVDARHIIENAKQDVDDEYGVSQALARGLQSYYAVAHAVTERVDKQSALMVNGVLKQYQIKGLEWLVSLYNNNLNGILADEMGLGKTIQTIALITYLMEHKRINGPFLIIVPLSTLSNWAYEFDKWAPSVVKVSYKGSPAARRAFVPQLRSGKFNVLLTTYEYIIKDKHILAKIRWKYMIVDEGHRMKNHHCKLTQVLNTHYVAPRRLLLTGTPLQNKLPELWALLNFLLPTIFKSCSTFEQWFNAPFAMTGEKVDLNEEETILIIRRLHKVLRPFLLRRLKKEVEAQLPEKVEYVIKCDMSALQRVLYRHMQAKGVLLTDGSEKDKKGKGGTKTLMNTIMQLRKICNHPYMFQHIEESFSEHLGFTGGIVQGLDLYRASGKFELLDRILPKLRATNHKVLLFCQMTSLMTIMEDYFAYRGFKYLRLDGTTKAEDRGMLLKTFNEPGSEYFIFLLSTRAGGLGLNLQSADTVIIFDSDWNPHQDLQAQDRAHRIGQQNEVRVLRLCTVNSVEEKILAAAKYKLNVDQKVIQAGMFDQKSSSHERRAFLQAILEHEEQDESRHCSTGSGSASFAHTAPPPAGVNPDLEEPPLKEEDEVPDDETVNQMIARHEEEFDLFMRMDLDRRREEARNPKRKPRLMEEDELPSWIIKDDAEVERLTCEEEEEKMFGRGSRHRKEVDYSDSLTEKQWLKKITGKDIHDTASSVARGLQFQRGLQFCTRASKAIEEGTLEEIEEEVRQKKSSRKRKRDSDAGSSTPTTSTRSRDKDDESKKQKKRGRPPAEKLSPNPPNLTKKMKKIVDAVIKYKDSSSGRQLSEVFIQLPSRKELPEYYELIRKPVDFKKIKERIRNHKYRSLNDLEKDVMLLCQNAQTFNLEGSLIYEDSIVLQSVFTSVRQKIEKEDDSEGEESEEEEEGEEEGSESESRSVKVKIKLGRKEKAQDRLKGGRRRPSRGSRAKPVVSDDDSEEEQEEDRSGSGSEED

SEQ ID NO: 33 - DNA, 10394 bp, Homo sapiens; identical to SEQ ID NO: 29

SEQ ID NO: 34 - protein, 2817 aa, Homo sapiens; identical to SEQ ID NO: 30

SEQ ID NO: 35 - DNA, 2129 bp, Homo sapiens
tctgcgccgccatgtcgcggaggctgctgccccgggcggagaagcggcgtcggcggctggagcagaggcagcagccggacgagcagcggaggcggtcgggagcgatggtgaagatggcggcggcgggcggcggaggcggcggtggccgctactacggcggcggcagtgagggcggccgggcccctaagcggctcaagactgacaacgccggcgaccagcacggaggcggcggcggtggcggtggaggagccggggcggcgggcggcggcggcggtggggagaactacgatgacccgcacaaaacccctgcctccccagttgtccacatcaggggcctgattgacggtgtggtggaagcagaccttgtggaggccttgcaggagtttggacccatcagctatgtggtggtaatgcctaaaaagagacaagcactggtggagtttgaagatgtgttgggggcttgcaacgcagtgaactacgcagccgacaaccaaatatacattgctggtcacccagcttttgtcaactactctaccagccagaagatctcccgccctggggactcggatgactcccggagcgtgaacagtgtgcttctctttaccatcctgaaccccatttattcgatcaccacggatgttctttacactatctgtaatccttgtggccctgtccagagaattgtcattttcaggaagaatggagttcaggcgatggtggaatttgactcagttcaaagtgcccagcgggccaaggcctctctcaatggggctgatatctattctggctgttgcactctgaagatcgaatacgcaaagcctacacgcttgaatgtgttcaagaatgatcaggatacttgggactacacaaaccccaatctcagtggacaaggtgaccctggcagcaaccccaacaaacgccagaggcagccccctctcctgggagatcaccccgcagaatatggagggccccacggtgggtaccacagccattaccatgatgagggctacgggccccccccacctcactacgaagggagaaggatgggtccaccagtggggggtcaccgtcggggcccaagtcgctacggcccccagtatgggcaccccccaccccctcccccaccacccgagtatggccctcacgccgacagccctgtgctcatggtctatggcttggatcaatctaagatgaactgtgaccgagtcttcaatgtcttctgcttatatggcaatgtggagaaggtgaaattcatgaaaagcaagccgggggccgccatggtggagatggctgatggctacgctgtagaccgggccattacccacctcaacaacaacttcatgtttgggcagaagctgaatgtctgtgtctccaagcagccagccatcatgcctggtcagtcatacgggttggaagacgggtcttgcagttacaaagacttcagtgaatcccggaacaatcggttctccaccccagagcaggcagccaagaaccgcatccagcaccccagcaacgtgctgcacttcttcaacgccccgctggaggtgaccgaggagaacttctttgagatctgcgatgagctgggagtgaagcggccatcttctgtgaaagtattctcaggcaaaagtgagcgcagctcctctggactgctggagtgggaatccaagagcgatgccctggagactctgggcttcctgaaccattaccagatgaaaaacccaaatggtccatacccttacactctgaagttgtgtttctccactgctcagcacgcctcctaattaggtgcctaggaagagtcccatctgagcaggaagacatttctctttcctttatgccattttttgtttttgttatttgcaaaagatcttgtattccttttttttttttttttttttttttttaaatgctaggtttgtagaggcttacttaaccttaatggaaacgctggaaatctgcagggggagggagaggggaactgttatctcccaagattaaccttcacttttaaaaaattattgtacatgtgatttttttttttcctgttcatacatttgtgctgcccatgtactcttggcacatttcaataaaattgtttggaaaataaacacagcaaaaaaaaaaaaaaa

SEQ ID NO: 36 - protein, 589 aa, Homo sapiens
MSRRLLPRAEKRRRRLEQRQQPDEQRRRSGAMVKMAAAGGGGGGGRYYGGGSEGGRAPKRLKTDNAGDQHGGGGGGGGGAGAAGGGGGGENYDDPHKTPASPVVHIRGLIDGVVEADLVEALQEFGPISYVVVMPKKRQALVEFEDVLGACNAVNYAADNQIYIAGHPAFVNYSTSQKISRPGDSDDSRSVNSVLLFTILNPIYSITTDVLYTICNPCGPVQRIVIFRKNGVQAMVEFDSVQSAQRAKASLNGADIYSGCCTLKIEYAKPTRLNVFKNDQDTWDYTNPNLSGQGDPGSNPNKRQRQPPLLGDHPAEYGGPHGGYHSHYHDEGYGPPPPHYEGRRMGPPVGGHRRGPSRYGPQYGHPPPPPPPPEYGPHADSPVLMVYGLDQSKMNCDRVFNVFCLYGNVEKVKFMKSKPGAAMVEMADGYAVDRAITHLNNNFMFGQKLNVCVSKQPAIMPGQSYGLEDGSCSYKDFSESRNNRFSTPEQAAKNRIQHPSNVLHFFNAPLEVTEENFFEICDELGVKRPSSVKVFSGKSERSSSGLLEWESKSDALETLGFLNHYQMKNPNGPYPYTLKLCFSTAQHAS

SEQ ID NO: 37 - DNA, 5153 bp, Homo sapiens
gggcgcagaggaggaaagggagcaggcgcagggggactggaaaggcagcatgcgctcgccaggagcaacctcggcgcccagggtctgaggctgcagccccagttcgccattgtgagccgccgccgggggagtccgctagcgcagccgtgcccccgagtccccgtccgcgcagcgatggggcacctgcccacggggatacacggcgcccgccgcctcctgcctctgctctggctctttgtgctgttcaagaatgctacagctttccatgtaactgtccaagatgataataacatcgttgtctcattagaagcttcagacgtcatcagtccagcatctgtgtatgttgtgaagataactggtgaatccaaaaattatttcttcgaatttgaggaattcaacagcactttgcctcctcctgttattttcaaggccagttatcatggcctttattatataatcactctggtagtggtaaatggaaatgtggtgaccaagccatccagatcaatcactgtgttaacaaaacctctacctgtaaccagtgtttccatatatgactataaaccttctcctgaaacaggagtcctgtttgaaatacattatccagaaaaatataacgttttcacaagagtgaacattagctactgggaaggtaaagacttccggacaatgctatataaagatttctttaagggaaaaacagtatttaatcactggctgccaggaatgtgttatagtaatatcacctttcagctggtatctgaggcaacttttaataaaagtacccttgttgagtacagtggtgtcagtcacgaacccaaacagcacagaactgccccttatccacctcaaaatatttccgttcgtatcgtaaacttgaacaaaaacaactgggaagaacagagtggcaatttcccagaagaatccttcatgagatcacaagatacaataggaaaagaaaaactcttccattttacagaagaaacccctgaaattccctcgggcaacatttcttccggttggcctgattttaatagcagtgactatgaaactacgtctcagccatattggtgggacagtgcatctgcagctcctgaaagtgaagatgaatttgtcagcgtacttcccatggaatacgaaaataacagtacactcagtgagacagagaagtcaacatcaggctctttctcctttttccctgtgcaaatgatattgacctggttaccacccaaaccacccactgcttttgatgggttccatatccatattgaacgagaagagaactttactgaatatttgatggtggatgaagaagcacatgaatttgttgcagaactgaaggaacctgggaaatataagttatctgtgacaacctttagttcctcaggatcttgtgaaactcgaaaaagtcagtcagcaaaatcactcagcttttatatcagtccttcaggagagtggattgaagaactgaccgagaagccgcagcacgtgagtgtccacgttttaagctcaaccactgccttgatgtcctggacatcttcccaagagaactacaacagcaccattgtgtctgtggtgtcgctgacctgccagaaacaaaaggagagccagaggcttgaaaagcagtactgcactcaggtgaactcaagcaaacctattattgaaaatctggttcctggtgcccagtaccaggttgtaatatacctaaggaaaggccctttgattggaccaccttcagatcctgtgacatttgctattgttcccacaggaataaaggatttaatgctctatcctttgggtcctacggccgtggttctgagctggaccagaccttatttaggcgtgttcagaaaatacgtggttgaaatgttttatttcaaccctgctacaatgacatcagagtggaccacctactatgaaatagcagcaactgtttccttaactgcatccgtgagaatagctaatctgctgccagcatggtactacaacttccgggttaccatggtgacgtggggagatccagaattgagctgctgtgacagctctaccatcagcttcataacagccccagtggctccggaaatcacttctgtggaatatttcaacagtctgttatatatcagttggacatatggggatgatacaacggacttgtcccattctagaatgcttcactggatggtggttgcagaaggaaaaaagaaaattaaaaagagtgtaacacgcaatgtcatgactgcaattctcagcttgcctccaggcgacatctataacctctcagtaactgcttgtactgaaagaggaagtaatacctccatgctccgccttgtcaagctagaaccagctccacccaaatcactcttcgcagtgaacaaaacccagacttcagtgactttgctgtgggtggaagagggagtagctgatttctttgaagttttctgtcaacaagttggctccagtcagaaaaccaaacttcaggaaccagttgctgtttcttcccatgtcgtgaccatctccagccttcttcctgccactgcctacaattgtagtgtcaccagctttagccatgacagccccagtgtccctacgttcatagccgtctcaacaatggttacagagatgaatcccaatgtggtagtgatctccgtgctggccatccttagcacacttttaattggactgttgcttgttaccctcattattcttaggaaaaagcatctgcagatggctagggagtgtggagctggtacatttgtcaattttgcatccttagagagggatggaaagcttccatacaactggcgtaggagtatatttgctttcttaaccctgctaccctcatgtctttggactgattatcttttggcattttatattaatccttggagtaaaaatggtttaaagaagaggaaactgacaaacccggttcaactggatgactttgatgcctatattaaggatatggccaaagactctgactataaattttctcttcagtttgaggagttgaaattgattggactggatatcccacactttgctgcagatcttccactgaatcgatgtaaaaaccgttacacaaacatcctaccatatgacttcagccgtgtgagattagtctccatgaatgaagaggaaggtgcagactacatcaatgccaactatattcctggatacaactcaccccaggagtatattgccacccaggggccactgcctgaaaccagaaatgacttctggaagatggtcctgcaacaaaagtctcagattattgtcatgctcactcagtgtaatgagaaaaggagggtgaaatgtgaccattactggccattcacggaagaacctatagcctatggagacatcactgtggagatgatttcagaggaagagcaggacgactgggcctgtagacacttccggatcaactatgctgacgagatgcaggatgtgatgcattttaactacactgcatggcctgatcatggtgtgcccacagcaaatgctgcagaaagtatcctgcagtttgtacacatggtccgacagcaagctaccaagagcaaaggtcccatgatcattcactgcagtgctggcgtgggacggacaggaacattcattgccctggacaggctcttgcagcacattcgggatcatgagtttgttgacatcttagggctggtgtcagaaatgaggtcataccggatgtctatggtacagacagaggagcagtacatttttatccatcagtgtgtgcaactgatgtggatgaagaagaagcagcagttctgcatcagtgatgtcatatacgagaatgttagcaagtcctagttcagaatccggagcagagaggacatgatgtgcgcccatcctcccttgcttccagattgttttagtgggccctgatggtcatttttctaaacagaggccctgctttgtaatatgtggccaaggagataatttatctcacagaagcaccgggaagacttagccttaaagagcctacagtgtccttttggactctttcacttcgggacatttaataatggaccaaattcaacagaacaccaggaaggtcaagacgctctccaaagggcaggaagtacagcacttccgaagagtttagttggccctttgctggttgggctgagttttttatttttaagtgtttgtttttcagtgcaataatttttgtgtgtgtgtgattcttatcagaaagttgaattgttttctgcctacaccgttcatcagccccataacccaggaaggaacaggcattgttagcatcagattatacctcattattaaaaggaggcatggccacacatgaagaaatggtcattctacttcaaagaaattgagccagcactatctgtactccaacattaccggatctggattggggaggttggtcagggaagagaggggttctacccacagatcaactgtgtaatcttttactattcaagctataattcagcttcaaagtagagtagaaaaaaaattgtcttaactgttctagttcttgatggttttcttccttattaacagttggtgtttcttccttggcccttttggactaatgttactgtccaagttctttctcaagaaaccacatctggttcagaagagtgtcaagttggactctttgaactctgttgctgtctgagcaatcgtggtgcctagactttgcattccttgttctgttgacctgcatacatgtgagagctatttctttaagaactatataggctgtgaaaacgcactttctttcccccaaagagctgggaatttatgaagttatggcaatgaactgcagcatgctgggacaattatttgactacttttttttgtaatattgtcaaatgtctctatggattctgacagagatttctttttgttttgttattcttttggttgtcagtttcattttaacgagtgtaactagtaacattttattctttggattttgtataattacagtacatgattgtgtattgtgacatgaatgctgtcaaaatgacattgatggcattgtgaagcctgttactttgtgtcacttcctgataaataagaggtgatgacatggatatacaacagaaaacactttgagttgaaagtaaacacaagctggctgcttccctgtggcaactgtggct

SEQ ID NO: 38 - protein, 1216 aa, Homo sapiens
MGHLPTGIHGARRLLPLLWLFVLFKNATAFHVTVQDDNNIVVSLEASDVISPASVYVVKITGESKNYFFEFEEFNSTLPPPVIFKASYHGLYYIITLVVVNGNVVTKPSRSITVLTKPLPVTSVSIYDYKPSPETGVLFEIHYPEKYNVFTRVNISYWEGKDFRTMLYKDFFKGKTVFNHWLPGMCYSNITFQLVSEATFNKSTLVEYSGVSHEPKQHRTAPYPPQNISVRIVNLNKNNWEEQSGNFPEESFMRSQDTIGKEKLFHFTEETPEIPSGNISSGWPDFNSSDYETTSQPYWWDSASAAPESEDEFVSVLPMEYENNSTLSETEKSTSGSFSFFPVQMILTWLPPKPPTAFDGFHIHIEREENFTEYLMVDEEAHEFVAELKEPGKYKLSVTTFSSSGSCETRKSQSAKSLSFYISPSGEWIEELTEKPQHVSVHVLSSTTALMSWTSSQENYNSTIVSVVSLTCQKQKESQRLEKQYCTQVNSSKPIIENLVPGAQYQVVIYLRKGPLIGPPSDPVTFAIVPTGIKDLMLYPLGPTAVVLSWTRPYLGVFRKYVVEMFYFNPATMTSEWTTYYEIAATVSLTASVRIANLLPAWYYNFRVTMVTWGDPELSCCDSSTISFITAPVAPEITSVEYFNSLLYISWTYGDDTTDLSHSRMLHWMVVAEGKKKIKKSVTRNVMTAILSLPPGDIYNLSVTACTERGSNTSMLRLVKLEPAPPKSLFAVNKTQTSVTLLWVEEGVADFFEVFCQQVGSSQKTKLQEPVAVSSHVVTISSLLPATAYNCSVTSFSHDSPSVPTFIAVSTMVTEMNPNVVVISVLAILSTLLIGLLLVTLIILRKKHLQMARECGAGTFVNFASLERDGKLPYNWRRSIFAFLTLLPSCLWTDYLLAFYINPWSKNGLKKRKLTNPVQLDDFDAYIKDMAKDSDYKFSLQFEELKLIGLDIPHFAADLPLNRCKNRYTNILPYDFSRVRLVSMNEEEGADYINANYIPGYNSPQEYIATQGPLPETRNDFWKMVLQQKSQIIVMLTQCNEKRRVKCDHYWPFTEEPIAYGDITVEMISEEEQDDWACRHFRINYADEMQDVMHFNYTAWPDHGVPTANAAESILQFVHMVRQQATKSKGPMIIHCSAGVGRTGTFIALDRLLQHIRDHEFVDILGLVSEMRSYRMSMVQTEEQYIFIHQCVQLMWMKKKQQFCISDVIYENVSKS

SEQ ID NO: 39 - DNA, 10394 bp, Homo sapiens; identical to SEQ ID NO: 29

SEQ ID NO: 40 - protein, 2817 aa, Homo sapiens; identical to SEQ ID NO: 30

SEQ ID NO: 41 - DNA, 5819 bp, Homo sapiens
cgtttctgcggagaggcgggaggcgctgagagtctgcgcggaggtccgtgcacagactgctttgcctgttgttgctcttcggaggcggcgatccccgaaggcgagctgaaatacggctgcaggctacaatttgcagccgacgattaaggaagacgacgagcgggagaggtggcccaccctcatggagcgcttgtgctcggatggcttcgcatttccccattactacattaaaccgtatcatctgaagaggatccacagagctgtcttacgtggtaatctggagaaactgaagtaccttctgctcacgtattatgacgccaataagagagacaggaaggaaaggactgccctacatttggcctgtgccactggccaaccggaaatggtacatctcctggtgtccagaagatgtgagcttaacctctgcgaccgtgaagacaggacacctctgatcaaggctgtacaactgaggcaggaggcttgtgcaactcttctgctgcaaaatggcgccgatccaaatattacggatgtctttggaaggactgctctgcactacgctgtgtataatgaagatacatccatgatagaaaaacttctttcacatggtacaaatattgaagaatgcagcaagaatgaatatcagccactgttacttgctgtgagtcgaagaaaagtgaaaatggtggaatttttattaaagaaaaaagcaaatgtaaatgccattgattatcttggcagatcagccctcatacttgctgttactcttggagaaaaagatatagtcattcttcttctgcagcacaatattgatgtgttttctcgagatgtgtatggaaagcttgcagaagattatgccagtgaggctgagaatagagttgtctcctcagaaacaacgagctgagaaggctacaagtgacgacaaagattctgtttcaaatatagccacagaaataaaggagggacctatatctgggacagtgtcttctcagaaacaaccagctgagaaggctacaagtgacgagaaagattctgtttcaaatatagccacagaaataaaggagggacaacaatctgggacagtgtctcctcagaaacaatcggcccagaaggttatatttaaaaagaaagtttctcttttgaatattgccacaagaataatgggcggtgggaaatctggaacagtgtcttctcagaaacaaccagcctcaaagactgcaagtgacaagacagattctgctttgaatacagctacagaaataaaggatggactacaatgtgggacagtgtcttctcagaaacaacaagccttgaaggctacaactgacgaggaaggttctgtttctaatatagccacagaaataaaggatggagaaaaatctgggacagtgtcttctcagaaaaaaccagccttgaaggccacaagtgatgagaaagattctttttcgaatataaccagagaaaaaaaggatggagaaatatctaggacagtgtcttctcagaaaccaccagccttgaaggctacaagtgtcaaggaagattctgttttgaatatagccagagaaaaaaaggatggagaaaaatctaggacagtgtcttttgagcaaccaccaggcttgaaggctacaagagacgagaaagattctcttttgaatatagccagaggaaaaaaagatggagaaaaaactaggagagtgtcttctcataaacaaccatccttgaaggctacaagtgacaaggaagattctgttccgaatatggccacagaaacaaaggatgaacaaatatctgggacagtgtcttgtcagaaacaaccagccttgaaggctacaagtgacaagaaagattctgtttcgaatatacccacagaaataaaggatggacaacaatctggaacagtgtcttctcagaaacaaccggcctggaaggctacaagtgtcaagaaagattctgtttcgaatatagccacagaaataaaggatggacaaatacgtgggacagtgtcttctcagagacgaccagccttgaagactacaggtgatgagaaagattctgtttcgaatatagccagagaaataaaggatggagaaaaatctgggacagtgtctcctcagaaacaatcggcccagaaggttatatttaaaaagaaagtttctcttttgaatattgccacaagaataacgggcggtgggaaatctggaacagagtatcctgagaatctgcgcaccttgaaggctacaattgaaaataaagattctgttctgaatacagccaccaaaatgaaggaggtacaaacatccacaccagcagaacaagacttagaaatggcatcagagggagagcaaaagaggcttgaagaatatgaaaataaccagccacaggtgaaaaaccaaatacattctagggatgaccttgatgacataattcagtcatctcaaacagtctcagaggacggtgactcgctttgctgtaattgtaagaatgtcatattactcattgatcaacatgaaatgaagtgtaaagattgtgttcacctattgaaaattaaaaatacattttgtttatggaaaagattaataaaacttaaagataaccactgtgagcaacttagagtaaaaattcgaaaactgaaaaataaggctagtgtactacaaaagagaatatctgaaaaagaagaaataaaatcgcagttaaagcatgaaatacttgaattggaaaaagaactctgtagtttgagatttgccatacagcaagaaaaaaagaaaagaagaaatgttgaagagttgcaccaaaaagttagggaaaagttaagaataacagaagagcaatataggatagaagctgatgtgacaaaaccaattaaaccggctctcaaatcagcagaggtggaattgaagacaggaggaaataattcaaatcaggtttctgaaactgatgaaaaagaagacctgctgcatgaaaaccgcttgatgcaagatgaaattgccaggctcaggctggaaaaagacacaataaaaaaccaaaacctggaaaagaaatacttaaaagactttgaaattgtgaaaagaaagcatgaagaccttcaaaaggctctaaaacggaatggggaaacattagcaaaaacgatagcctgttatagtggacagcttgctgctctgacagatgaaaacacaacgctccgttccaaactggagaagcaaagagagagcaggcaaagactggaaacagaaatgcaatcataccgttgtagactgaatgctgctcgatgtgatcatgatcaaagtcactcatcaaaaagagaccaagagcttgctttccagggcacagtagataaatgtcgtcacttacaggaaaatttgaattctcatgttctgattctttctctgcaactttctaaagctgagagtaagtccagagtcctcaaaactgagctccattacacaggagaggctctgaaagaaaaggctttggtttttgaacacgtgcaaagtgagctaaagcaaaaacagagtcaaatgaaggacattgaaaaaatgtacaaaagtggatacaatacaatggaaaaatgcatagaaaaacaggaaagattttgtcaactaaaaaaacaaaatatgttgcttcaacagcaactggatgatgctcgcaacaaagctgacaatcaagaaaaagcaatacttaatattcaagccagatgtgatgctagagtacaaaaccttcaagctgagtgcagaaagcaccgtcttttactagaagaagacaataaaatgttggtcaatgaactgaatcattcgaaagaaaaagaatgccaatatgaaaaagagaaagcagaaagagaagtagctgtgagacagcttcaacaaaaacgagatgatgtcttaaacaaaggatcagcaacaaaagctctgctggatgcttcatcgcgtcactgcacctatttagaaaatgggatgcaggattcaaggaagaaattagaccagatgagaagtcaatttcaagaaatacaggatcaacttacagctactataagatgtactaaggagatggaaggcgacacacaaaagcttgaagtagaacatgtgatgatgagaaaaattattaaaaaacaggatgaccaaattgagcggcttgagaaaatcctgcagcattcaagtttgatgctgcaggtgtttgagagctagatgaagcatccagccaaactagactacatggagctccacagtgatcgtcttcacctccagctgtttgcatttacttcttccctctatcctacatgtgttttccttccccttcagatatcaacctatgaattgcctctaccaaaaagcctacaatattgacacaaacctgggctagtatcccttctatgtcttccaataagtgctgtcttatgcttgtcattgtatgtatgactctgtatgggaattgcctgtttgttttttcagattatagcatacagttgttgaggggcggaccgtatcatctttatcttgtaattccagtgcttgtcctagtaccttagcacatggttgctgaatacatgaacgaagagtgagaaaccagaagctctgatacttaactgccatgataatgaattcggtgtgcaactatgggcaaattatatttaatagtaattgcatattgtacatatttttcattcttattaacactgataagcttttcagcatatactgactttctcttagttaactgtgaaatcatttagataaagaatataattctttttcattctaacttctgaatttaaatctgaatcctctatagcaggggtccccaactcccaggccacacacagttccatgacctgttaggaagcaggctgcacagcaggaggtgagtggcaggcaagcgagtgaagcttcatctgtatttccagccactccctgttgctcacattatcacctgagctctgcctcctgtcagatcagcaaagccattagattctcacaggagtgaaaatcctactgtgaactgctcgttcaagggatctaggtcacatgctccttatgagactctaatgcctgatgatatgtcattgtctcctatctcttcacgatgggaccatctagttacagaaaaacaagctcaggactcccattgattctccattatgatgagttgtgtaattatttcattatgtattacaatgtagtcataataggaataaagtgcacaatagatgtaatacgcttgaatcaccatcctgaaaccatcccccaaacccccatctgtggaaaaattatctttcacaaaactgctgcctggtgccaaaaaggctggggactgctgctctatagcttctgcactagaatctactaatgagtaaaatttaaatcaataactagttttaaaagcataacaagaatatgtgctgtctggctgcagtggctcatgcctgtattctcagcactttgggaggccagtgcaggtggatcacttgaggtcaggagttcaagaccagcctggccaatatggtgaaatcctgtctctactaaaaatacaaaaattagctgggtgtggtggtgcatgcctgtagtctcagctactcgggaggctgaggtgggagaatcacttgaacccgggaggcagaggtttcagtgagccaagatcgtgccactgcactccagcctgagcaacagagtgactccatctcaaatgcaaaacaaaacagaaagaatacatgctgacgaaaaaaatctaagacaataaaattgtattactaggctgttaacatgatattttgtttcccgttaaatgtgtgacatgcaaaagtatttattaaatgaaaatattttttatctttt

SEQ ID NO: 42 - protein, 1121 aa, Homo sapiens
MCFLEMCMESLQKIMPVRLRIELSPQKQRAEKATSDDKDSVSNIATEIKEGPISGTVSSQKQPAEKATSDEKDSVSNIATEIKEGQQSGTVSPQKQSAQKVIFKKKVSLLNIATRIMGGGKSGTVSSQKQPASKTASDKTDSALNTATEIKDGLQCGTVSSQKQQALKATTDEEGSVSNIATEIKDGEKSGTVSSQKKPALKATSDEKDSFSNITREKKDGEISRTVSSQKPPALKATSVKEDSVLNIAREKKDGEKSRTVSFEQPPGLKATRDEKDSLLNIARGKKDGEKTRRVSSHKQPSLKATSDKEDSVPNMATETKDEQISGTVSCQKQPALKATSDKKDSVSNIPTEIKDGQQSGTVSSQKQPAWKATSVKKDSVSNIATEIKDGQIRGTVSSQRRPALKTTGDEKDSVSNIAREIKDGEKSGTVSPQKQSAQKVIFKKKVSLLNIATRITGGGKSGTEYPENLRTLKATIENKDSVLNTATKMKEVQTSTPAEQDLEMASEGEQKRLEEYENNQPQVKNQIHSRDDLDDIIQSSQTVSEDGDSLCCNCKNVILLIDQHEMKCKDCVHLLKIKNTFCLWKRLIKLKDNHCEQLRVKIRKLKNKASVLQKRISEKEEIKSQLKHEILELEKELCSLRFAIQQEKKKRRNVEELHQKVREKLRITEEQYRIEADVTKPIKPALKSAEVELKTGGNNSNQVSETDEKEDLLHENRLMQDEIARLRLEKDTIKNQNLEKKYLKDFEIVKRKHEDLQKALKRNGETLAKTIACYSGQLAALTDENTTLRSKLEKQRESRQRLETEMQSYRCRLNAARCDHDQSHSSKRDQELAFQGTVDKCRHLQENLNSHVLILSLQLSKAESKSRVLKTELHYTGEALKEKALVFEHVQSELKQKQSQMKDIEKMYKSGYNTMEKCIEKQERFCQLKKQNMLLQQQLDDARNKADNQEKAILNIQARCDARVQNLQAECRKHRLLLEEDNKMLVNELNHSKEKECQYEKEKAEREVAVRQLQQKRDDVLNKGSATKALLDASSRHCTYLENGMQDSRKKLDQMRSQFQEIQDQLTATIRCTKEMEGDTQKLEVEHVMMRKIIKKQDDQIERLEKILQHSSLMLQVFES

SEQ ID NO: 43 - DNA, 4303 bp, Homo sapiens
agtgcacgccgggcaagaggaagacctccatcagctcgccgcgcagcgcggctgtatttgcggcctgtgcgagtaggcgcttgggcactcagtctccctggcgagcgacgggcagaaatctcgaaccagtggagcgcactcgtaacctggatcccagaaggtcgcgaaggcagtaccgtttcctcagcggcggactgctgcagtaagaatgtcttttccacctcatttgaatcgccctcccatgggaatcccagcactcccaccagggatcccacccccgcagtttccaggatttcctccacctgtacctccagggaccccaatgattcctgtaccaatgagcattatggctcctgctccaactgtcttagtacccactgtgtctatggttggaaagcatttgggcgcaagaaaggatcatccaggcttaaaggctaaagaaaatgatgaaaattgtggtcctactaccactgtttttgttggcaacatttccgagaaagcttcagacatgcttataagacaactcttagctaaatgtggtttggttttgagctggaagagagtacaaggtgcttccggaaagcttcaagccttcggattctgtgagtacaaggagccagaatctaccctccgtgcactcagattattacatgacctgcaaattggagagaaaaagctactcgttaaagttgatgcaaagacaaaggcacagctggatgaatggaaagcaaagaagaaagcttctaatgggaatgcaaggccagaaactgtcactaatgacgatgaagaagccttggatgaagaaacaaagaggagagatcagatgattaaaggggctattgaagttttaattcgtgaatactccagtgagctaaatgccccctcacaggaatctgattctcaccccaggaagaagaagaaggaaaagaaggaggacattttccgcagatttccagtggccccactgatcccttatccactcatcactaaggaggatataaatgctatagaaatggaagaagacaaaagagacctgatatctcgagagatcagcaaattcagagacacacataagaaactggaagaagagaaaggcaaaaaggaaaaagaaagacaggaaattgagaaagaacggagagaaagagagagggagcgtgaaagggaacgagaaaggcgagaacgggaacgagaaagggaaagagaacgtgaacgagaaaaggagaaagaacgggagcgggaacgagaacgggatagggaccgtgaccggacaaaagagagagaccgagatcgggatcgagagagagatcgtgaccgggatagagaaaggagctcagatcgtaataaggatcgcagtcgatcaagagaaaaaagcagagatcgtgaaagggaacgagagcgggaaagagagagagagagagaacgagagcgagaacgagaacgggagcgagagagagagcgagagagggaacgggagcgagaaagagaaaaagacaaaaaacgggaccgagaagaagatgaagaagatgcatacgaacgaagaaaacttgaaagaaaactccgagagaaagaagctgcttatcaagagcgccttaagaattgggaaatcagagaacgaaagaaaacccgggaatatgagaaagaagctgaaagagaagaagaaagaagaagagaaatggccaaagaagctaaacgactaaaagaattcttagaagactatgatgatgatagagatgaccccaaatattacagaggaagtgctcttcagaaaaggttgcgtgatagagaaaaggaaatggaagcagatgaacgagataggaagagagagaaggaggagcttgaggaaatcaggcagcgccttctggcagaagggcatccagatccagatgcagagctccagaggatggaacaagaggctgagaggcgcaggcagccacaaataaagcaagagccagaatcagaagaggaggaagaagaaaagcaagaaaaagaagaaaaacgagaagaacccatggaagaggaagaggagccagagcaaaagccttgtctgaaacctactctgaggcccatcagctctgctccatctgtttcctctgccagtggcaatgcaacacctaacactcctggggatgagtctccctgtggtattattattcctcatgaaaactcaccagatcaacagcaacctgaggagcataggccaaaaataggactaagtcttaaactgggtgcttccaatagtcctggtcagcctaattctgtgaagagaaagaaactacctgtagatagtgtctttaacaaatttgaggatgaagacagtgatgacgtaccccgaaaaaggaaactggttcccttggattatggtgaagatgataaaaatgcaaccaaaggcactgtaaacactgaagaaaagcgtaaacacattaagagtctcattgagaaaatccctacagccaaacctgagctcttcgcttatcccctggattggtctattgtggattctatactgatggaacgtcgaattagaccatggattaataagaaaatcatagaatatataggtgaagaagaagctacattagttgattttgtttgttctaaggttatggctcatagttcaccccagagcattttagatgatgttgccatggtacttgatgaagaagcagaagtttttatagtcaaaatgtggagattattgatatatgaaacagaagccaagaaaattggtcttgtgaagtaaaactttttatatttagagttccatttcagatttcttctttgccacccttttaaggactttgaatttttctttgtctttgaagacattgtgagatctgtaattttttttttttgtagaaaatgtgaattttttggtcctctaatttgttgttgccctgtgtactcccttggttgtaaagtcatctgaatccttggttctctttatactcaccaggtacaaattactggtatgttttataagccgcagctactgtacacagcctatctgatataatcttgttctgctgatttgtttcttgtaaatattaaaacgactccccaattattttgcagaattgcacttaatattgaaatgtactgtataggaaccaacatgaacaattttaattgaaaacaccagtcataaactattaccacccccactctcttttgatcagaaatggcaagcccttgtgaaggcatggagtttaaaattggaatgcaaaaattagcagacaatccattcctactgtatttctgtatgaatgtgtttgtgaatgtatgtgtaaaagtctttcttttccctaatttgctttggtggggtccttaaaacatttcccaactaaagaatagaattgtaaaggaaaagtggtactgttccaacctgaaatgtctgttataattaggttattagtttcccagagcatggtgttctcgtgtcgtgagcaatgtggtttgctaactggatggggttttcttattaataagatggctgcttcagcttctcttttaaaggaatgtggatcatagtgatttttccttttaattttattgctcagaaatgaggcatatcctaaaaatcctggagagctgtatttaatgcatttttgcactaattggtccttagtttaattctattgtatctgtttatttaacaaaaaattcatcataccaaaaagtgtaagtgaaaaccccctttaaaacaaaacaaaaaaatgaaataaaattaggcaaattgacagacagtgagagttttacaaacatgataggtattctgctcggcaatttgtaagtttacatgttatttaaggataaaggtaaatcattcaaggcagttaccaaccactaactatttgttttcatttttgtcttgtagaaggtttatatcttgttttaccttggctcattagtgtttaaaaatgtactgatgatgtgcttagagaaattcctggggctttcttcgttgtagatcagaatttcaccagggagtaaaattacctgaaaacgtaagaagttttaaacagcttttcacacaaattagatgcaactgttcccatgtctgagtacttatttaaaagaaaggtaaagattggcctgttagaaaaagcataatgtgagctttggattactggattttttttttttttaaacacacctggagaggacatttgaaaacactgttcttaccctcgaaccctgatgtggttccattatgtaaatatttcaaatattaaaaatgtatatatttgatcctggggactcatattctttcagaatcatgtaaataaatggcatcatgttgtaa

SEQ ID NO: 44 - protein, 843 aa, Homo sapiens
MSFPPHLNRPPMGIPALPPGIPPPQFPGFPPPVPPGTPMIPVPMSIMAPAPTVLVPTVSMVGKHLGARKDHPGLKAKENDENCGPTTTVFVGNISEKASDMLIRQLLAKCGLVLSWKRVQGASGKLQAFGFCEYKEPESTLRALRLLHDLQIGEKKLLVKVDAKTKAQLDEWKAKKKASNGNARPETVTNDDEEALDEETKRRDQMIKGAIEVLIREYSSELNAPSQESDSHPRKKKKEKKEDIFRRFPVAPLIPYPLITKEDINAIEMEEDKRDLISREISKFRDTHKKLEEEKGKKEKERQEIEKERRERERERERERERREREREREREREREKEKERERERERDRDRDRTKERDRDRDRERDRDRDRERSSDRNKDRSRSREKSRDREREREREREREREREREREREREREREREREREREKDKKRDREEDEEDAYERRKLERKLREKEAAYQERLKNWEIRERKKTREYEKEAEREEERRREMAKEAKRLKEFLEDYDDDRDDPKYYRGSALQKRLRDREKEMEADERDRKREKEELEEIRQRLLAEGHPDPDAELQRMEQEAERRRQPQIKQEPESEEEEEEKQEKEEKREEPMEEEEEPEQKPCLKPTLRPISSAPSVSSASGNATPNTPGDESPCGIIIPHENSPDQQQPEEHRPKIGLSLKLGASNSPGQPNSVKRKKLPVDSVFNKFEDEDSDDVPRKRKLVPLDYGEDDKNATKGTVNTEEKRKHIKSLIEKIPTAKPELFAYPLDWSIVDSILMERRIRPWINKKIIEYIGEEEATLVDFVCSKVMAHSSPQSILDDVAMVLDEEAEVFIVKMWRLLIYETEAKKIGLVK

SEQ ID NO: 45 - DNA, 4065 bp, Homo sapiens
gggaacaaacttcagaaggaggagagacaccgggcccagggcaccctcgcgggcggacccaagcagtgagggcctgcagccggccggccagggcagcggcaggcgcggcccggacctacgggaggaagccccgagccctcggcgggctgcgagcgactccccggcgatgcctcacaactccatcagatctggccatggagggctgaaccagctgggaggggcctttgtgaatggcagacctctgccggaagtggtccgccagcgcatcgtagacctggcccaccagggtgtaaggccctgcgacatctctcgccagctccgcgtcagccatggctgcgtcagcaagatccttggcaggtactacgagactggcagcatccggcctggagtgatagggggctccaagcccaaggtggccacccccaaggtggtggagaagattggggactacaaacgccagaaccctaccatgtttgcctgggagatccgagaccggctcctggctgagggcgtctgtgacaatgacactgtgcccagtgtcagctccattaatagaatcatccggaccaaagtgcagcaaccattcaacctccctatggacagctgcgtggccaccaagtccctgagtcccggacacacgctgatccccagctcagctgtaactcccccggagtcaccccagtcggattccctgggctccacctactccatcaatgggctcctgggcatcgctcagcctggcagcgacaagaggaaaatggatgacagtgatcaggatagctgccgactaagcattgactcacagagcagcagcagcggaccccgaaagcaccttcgcacggatgccttcagccagcaccacctcgagccgctcgagtgcccatttgagcggcagcactacccagaggcctatgcctcccccagccacaccaaaggcgagcagggcctctacccgctgcccttgctcaacagcaccctggacgacgggaaggccaccctgaccccttccaacacgccactggggcgcaacctctcgactcaccagacctaccccgtggtggcagatcctcactcacccttcgccataaagcaggaaacccccgaggtgtccagttctagctccaccccttcctctttatctagctccgcctttttggatctgcagcaagtcggctccggggtcccgcccttcaatgcctttccccatgctgcctccgtgtacgggcagttcacgggccaggccctcctctcagggcgagagatggtggggcccacgctgcccggatacccaccccacatccccaccagcggacagggcagctatgcctcctctgccatcgcaggcatggtggcaggaagtgaatactctggcaatgcctatggccacaccccctactcctcctacagcgaggcctggcgcttccccaactccagcttgctgagttccccatattattacagttccacatcaaggccgagtgcaccgcccaccactgccacggcctttgaccatctgtagttgccatggggacagtgggagcgactgagcaacaggaggactcagcctgggacaggccccagagagtcacacaaaggaatctttatttattacatgaaaaataaccacaagtccagcattgcggcacactccctgtgtggttaatttaatgaaccatgaaagacaggatgaccttggacaaggccaaactgtcctccaagactccttaatgaggggcaggagtcccagggaaagagaaccatgccatgctgaaaaagacaaaattgaagaagaaatgtagcccccagccggtacccaccaaaggagagaagaagcaatagccgaggaacttggggggatggcgaatggttcctgcccgggcccaaggggtgcacagggcacctccatggctccattattaacacaactctagcaattatggaccataagcacttccctccagcccacaagtcacagcctggtgccgaggctctcctcaccagccacccagggagtcacctccctcagcctcccgcctgccccacacggaggctctggctgtcctctttctccactccatttgcttggctctttctacacctccctcttgggcatgggctgagggctggagcgagtccctcagaaattccaccaggctgtcagctgacctcttttgcctgctgctgtgaaggtatagcaccaccccaggtcctcctgcagtgcggcatccccttggcagctgccgtcagccaggccagccccagggagcttaaaacagacattccacagggcctgggcccctgggaggtgaggtgtggtgtgcggcttcacccagggcagaacaaggcagaatcgcaggaaacccgcttccccttcctgacagctcctgccaagccaaatgtgcttcctgcagctcacgcccaccagctactgaagggacccaaggcaccccctgaagccagcgatagagggtccctctctgctccccagcagctcctgcccccaaggcctgactgtatatactgtaaatgaaactttgtttgggtcaagcttccttctttctaacccccagactttggcctctgagtgaaatgtctctctttgccctgtggggcttctctccttgatgcttctttctttttttaaagacaacctgccattaccacatgactcaataaaccattgctcttcatctcaggctttggggttggctggggaaggaggcatcccggggctgggctttctcccaagaacatcagagctgagtagccgacaaactcactttggggccgtgggctggaagggaccatctgatgccccagagctctggcttggccttctccctctgcctttaattcacgttgaacgctgggtacctcactcatcccaagttcttcaacactgagcaaatgcaaggatagcacagtactgagccaaccatagactccccacaaggagttgctgttgttattaacaggaagccagagaatcagcagggtgggttagtgagggatccgggaatagctgtgactggagcctgcataaacagctctgaagggagagagaagactgggctctcttgtgtgccaggcacagtatggaaggcttcatataagttaagctgaaattagccctgttttacatacagcttcattttacatatgaggaaactgaggctttgaaaaaaatgagatgtcttgtccaagatgaaaagtagtagattcaaccaagtcctcttactctaagcccaacgcttttacccaaaaccccagagtcctcatcagggatgccaaatggttctagacccagtggaggttctggagctgccactggggatttaatttcttttgatttgctaaagatttgacctgactgaatggagaggtagagtgtagtgtggccaggacaaggtgagggaggctgtagagacttagcactttaggccaaccacctccaggaaatctgggaaatgcaatgtgacagctcgggctctgcactccagggggctgtctggtgtccacatggaccttctccatgtgggacacagctggaacaagggggcaggggcctgcagctgggatgcccaggtgaatatgggcagctggacaaacaacactgggattgagtcagatagaaggggcccaaggactccagggctgggaggacagaggctgggagagagggctcttacctccttaggcctcccaaagagcggttagggatgctgccatggatggcatggcagggggaaccctcctggaagaaaatccatctcttctgaagggatctgagatgcggctggtttttcaatggcagaacttccctctgcagcgcgactccgaatccatgacatctgagagtcttcctgaccacaaacctctgggatcccgagggctccctacccaagaatcactttgagcacagcatcccaaggagcccatagagcgatcccttgcattcacagccacagcccctctggggacactctgtacccccggcagaccctttccaactcacaaccaataaaggggcttgggctgtgctttgactaaggtgaaaaaaaaaaa

SEQ ID NO: 46 - protein, 450 aa, Homo sapiens
MPHNSIRSGHGGLNQLGGAFVNGRPLPEVVRQRIVDLAHQGVRPCDISRQLRVSHGCVSKILGRYYETGSIRPGVIGGSKPKVATPKVVEKIGDYKRQNPTMFAWEIRDRLLAEGVCDNDTVPSVSSINRIIRTKVQQPFNLPMDSCVATKSLSPGHTLIPSSAVTPPESPQSDSLGSTYSINGLLGIAQPGSDKRKMDDSDQDSCRLSIDSQSSSSGPRKHLRTDAFSQHHLEPLECPFERQHYPEAYASPSHTKGEQGLYPLPLLNSTLDDGKATLTPSNTPLGRNLSTHQTYPVVADPHSPFAIKQETPEVSSSSSTPSSLSSSAFLDLQQVGSGVPPFNAFPHAASVYGQFTGQALLSGREMVGPTLPGYPPHIPTSGQGSYASSAIAGMVAGSEYSGNAYGHTPYSSYSEAWRFPNSSLLSSPYYYSSTSRPSAPPTTATAFDHL

SEQ ID NO: 47 - DNA, 9379 bp, Homo sapiens
agaatgctctgcatcgacagcgggagacgagacgcgctcgggcgtcgctttgctgccgctaggccctgtgctcctccccgcagcggaaggcctacgaatacgcggtgtcttacgtcgcttcctccgttcttcgttgcactggccaacgggacgcttagtctttcggcaacggggtgaaaccttccttgtgcctgaaaaaacggtacttcgcggtgtggcttcggcgcctgcgcaaaaggccgcggggcgcactccagttcccggcaggccccgcgacgcgcgtttgcgtgctgacgcacgcagttagtcgtgctgacgtgcagcgcggcccaggcggggtgcgagtggcgcagttggagcccgttgcggcccctgaggaagcgaggaggcgtcggcgtcggctgaggcgggcggaccggcgaggcgaggcggcggccccaggcccgagggactcgggagctcgagcagcggcggcggcaagacctctccccctcggaggcggcgggcggaggcggcgggagcggtggtgccccccccgggcacggggccatgtacaacgggatcgggctgccgacgccccggggcagcggcaccaacggctacgtccagcgcaacctgtccctggtgcggggccgccggggtgagcggcctgactacaagggagaggaggaactgcggcgcctggaggctgccctggtgaagcggcctaatcctgacatcctggaccacgagcgcaagcggcgcgtcgagctgcgatgcctcgagctggaggagatgatggaagagcaggggtacgaggaacagcaaattcaggaaaaagtggcgacctttcgactcatgttgctggagaaggatgtgaaccctgggggcaaggaggagaccccagggcagaggccagcggtcacggagactcaccagttggcagaattaaatgagaagaagaatgaaagactccgtgctgcctttggcatcagtgattcttacgtagatggcagctcttttgatcctcagcgtcgtgcccgagaagctaaacaaccagctcctgagcctcccaaaccttacagccttgttcgggagtctagcagttctcgctcaccaaccccaaagcagaagaagaagaaaaagaagaaagatagaggacgcaggtcagagagcagctctcctcgacgggagagaaagaaaagctcaaagaagaagaagcacaggtcagaatctgagtccaagaaacgtaagcataggtctcccactccaaagagcaaacgtaaatctaaggacaaaaagcgaaagcggtctcgaagtacaacaccagcccccaagagccgccgggcccaccgttcaacttctgctgactctgcttcctcctccgatacttcccgcagtcggtctcgaagtgctgcagctaaaactcatacaactgccttggctgggcgaagtccttcccctgcttcagggcgacgcggggagggagatgcgcctttcagtgaaccaggtactaccagcacacaacggcctagtagcccggagactgctacgaaacagcctagcagcccttatgaagacaaagataaagacaagaaggagaaatctgcaactcgacctagcccctctccggaaaggagcagcacaggcccagaaccacctgctcccactccgctccttgctgagcgacatggcggctccccacaaccccttgcaaccacccccttaagccaggagccagtgaaccccccatctgaggcctctccaactcgggaccgttcaccacctaagtctcccgagaaacttccccagtcttcttcctcagagagcagcccaccatcccctcaacctaccaaagtttctcggcatgccagctcttccccagaaagtcctaaacctgctccagctccagggtcccaccgagagatttcttcttctcccacatctaagaatcgctcacatggccgagcaaaacgggataaatcacattctcataccccctcccgtaggatggggaggtcccgtagccctgccaccgctaagagagggcgatctcggtctcgaacccctaccaagagaggtcattctcgatcccgatctccccagtggcgtaggtccaggtctgcacagaggtggggaagatctagaagcccccagcgacgtggccgctctaggtctcctcagcgaccaggctggtctaggagcagaaatacccagagaagaggcaggtctaggtcagcaaggcgagggaggtcccactctagatccccagccactaggggtagatctcgttctagaacaccagcccgccggggcaggtcccgctctagaacacctgccaggcggagatcacgatccagaactcccaccaggcgtaggtctcggtctagaacaccagcccggaggggcaggtctcggtctagaacacctgctaggcgcagatctaggacccgatcaccagtacgacgcaggtctcgtagtagatcaccagccaggagaagtggcaggtcacgctctagaaccccagctagacgtggccgctcacgctccagaaccccagccagacgtggccgctcacgctctagaaccccagctagacgcagtggtcgctcacgctccagaacaccagccaggagagggaggtctcggtctaggacaccaagacgaggaagatcccgcagtagaagcttagttagacgtggaagatctcactctagaacacctcaaagaagaggcagatctggctcatcttcagagcggaaaaacaaatccagaacatctcaaagaagaagcaggtccaattcaagcccagaaatgaagaaatctcgcatttcttcaaggcggagcaggtctctctcttcaccacggtccaaagcaaaatctcgcttgtctttgaggcgcagcctttcagggtcttccccatgccctaaacaaaagtcacagacaccacccaggcgcagtcgctctggatcctcccaacctaaagctaaatctagaacgccacccagacgcagtcgctccagttcttctccgccacctaaacagaaatctaagacaccatcaagacaaagtcattccagttcatctcctcatcctaaagtgaaatctggaacaccaccgaggcaagggtccataacaagtccccaggccaatgagcaatctgtaacgccacagagacggagctgttttgaatcatcacctgaccctgagttgaaatctaggaccccttctagacatagctgctcagggtcctctcctcctagagtgaaatctagcacacctcccagacagagcccatctaggtcatcatctccacaacccaaagtgaaggcaataatatcaccaagacaaagaagccattctggctcctcttctccaagtcctagtagggtgacgtcgagaacaactccacggcgaagcagatcagtatctccctgctccaatgtggaatccagattgttgccaagatacagtcattctgggtcctcctcaccagataccaaagtgaaacctgaaacaccgccaagacaaagtcactcagggtctatttcaccataccccaaagtaaaggcccaaactccaccggggccaagtctttctggatcaaagtcaccatgtccccaagagaagtctaaagactcactagttcaaagttgccctggatccctctctctctgtgcaggagtaaaatctagcacaccaccaggcgagagctattttggtgtctcatctctgcaactgaaaggacaatctcaaacttcaccagaccacagatctgatacttcaagtccagaagtgagacagagtcattcagaatcaccatctctgcagagcaaatctcaaacatcacctaagggaggtcggtccaggtcttcatctccagtcactgagctggcatccagatctccaataagacaagatagaggtgagttctcagcgagtcctatgttgaaatctggaatgtctcctgagcagagcaggttccagtctgactcttcttcatatcctacagtggactcgaattctctcttggggcagagtagattggagactgctgaatcaaaagagaaaatggccttaccccctcaggaggatgctactgcatcacctcctagacagaaagacaaatttagtccctttccagtacaggataggcctgagtcttcactggtattcaaagacacacttagaaccccgccaagggaaagaagtggtgctgggtcatctccagaaacaaaagagcaaaatagtgcattgcctacgtcaagccaagatgaagagttaatggaggtggtagagaagtctgaagaacccgcaggccaaatcctgtctcatttgtcttcagaacttaaagaaatgtccacaagtaactttgaatcatctcctgaagtagaagaaaggcctgctgtgtctttgactcttgatcagagccagtcacaggcttctttggaagcagtagaagtcccttcaatggcctcatcttggggtgggccacatttttctccagaacataaagaactgtctaactccccactcagggagaacagctttggatcacctttagaatttagaaactcaggcccacttggtacagaaatgaatactggattttcttctgaggttaaagaagatttgaatggaccgtttcttaatcagctggaaacagatccatctctagacatgaaagaacaatcgacaagatcctctggacacagcagttctgagttatccccagatgcagtggaaaaggcagggatgtcttcaaatcagagcatctcttcacctgtgcttgatgctgtacccagaacaccctcgagagaaagaagtagttctgcatcttctcctgaaatgaaagatggtttacccagaactccatcaaggagaagcaggtctgggtcttctccaggacttagagatgggtctgggactccctcgaggcacagcctgtctgggtcctctcctggaatgaaagatatacctagaacgccatctagagggagaagcgaatgtgattcttccccagaaccgaaagctttgcctcagactcctaggccgaggagtcgttctccatcatccccagagctcaacaacaagtgtcttaccccccagagagaaagaagcgggtcagaatcatcagttgatcagaaaactgtggctcggactcccctggggcagagaagtcgttcgggatcctctcaagaacttgatgtgaaacccagtgcatcccctcaggaaagaagtgagtcagactcttctccagattctaaagccaagacaagaaccccacttcggcagaggagtcggtctggatcatctccagaggttgacagcaaatctcgactatcccctcggcgcagtaggtctggttcctcccctgaagtgaaagataagccaagagcagcacccagggcacagagtggttctgattcctctcctgaacctaaagctccagcccctcgggcccttcccagacgaagcagatcaggttcatcaagcaaaggcagaggcccttctcctgaaggaagcagcagtaccgagtcctctcctgaacatccgcccaaatccagaactgctcgcagaggttccaggtcatcaccagagcccaagaccaagtctcgtacaccacctcgacgtcgcagctctcgatcatctccggagctaacaaggaaggccagactgtcccgtagaagccgctctgcctcatcctcaccagaaactcgctctagaactcccccaaggcaccggagaagtccctcagtgtcttccccggagccagccgaaaaatcgaggtcttcacgccgacggcgctcagcttcatctccacgcactaagacaacctcaaggagaggccgctctccttcgccaaagcctcgtggactccagaggtcccgttcccgctcaaggagagagaaaacaagaacaacccgacgtcgagataggtctggatcttctcagtcaacctctcggcgaagacagcggagccggtcaaggtcgcgggttactcggcggcggaggggaggctctggttatcactcaaggtcacctgcccggcaggaaagttcccggacctcctctcgacgccgaagaggccgctctcggacacccccaaccagtcggaagcgttctcgctcacgcacatcaccagccccgtggaaacgctctagatctcgagcctctccagccactcaccggcgatccaggtccagaacccccctgataagccgacgtaggtccagatctcgaacttcaccagtcagccggagacggtcaaggtccaggacttcagtgactcgacgaagatcccggtcaagagcatccccagtgagcagaaggcgatccagatccagaacgccaccagtaacccgccgtcgttcaaggtctagaacgccaacaacacgccgccgctcccgttctagaactccaccagtgactcgcagaaggtccagatccaggactccaccagtaaccaggaggcgatctcgaagcagaacttcgcctatcactcgcagaagatcaagatccagaacatctccggtcacccgaaggagatctcgatctcgcacatctccagtaactcgaagaaggtcccgctctcgaacctcaccagtgacacgccgccgctctaggtcccggacacctccagctattcggcgccgctctagatctcgaacgccactgttaccacgcaaacgttctcgaagtcgctcaccacttgctatccgccgccgctccagatcccgtactccacgaacagctcggggtaaacggtccttaacaagatctcctccagccatccgcaggcgttctgcatctggaagtagttctgatcgttcacgatctgctactcctccagcaacaagaaatcattctggttcacggacacctccagtagcactcaacagttccagaatgagctgcttcagtcgtcctagcatgtccccaacacctcttgatcgctgcagatcacctggaatgcttgaaccccttggcagctctagaacacccatgtctgtcctgcagcaagccggcggctccatgatggatggtccaggtccccgaatacctgaccaccagagaacatctgtgccagaaaatcatgctcagtccaggattgcacttgccctgacagctatcagtcttggcaccgctcggcctcctccgtccatgtctgctgctggccttgctgcaagaatgtcccaggttccagccccggtgcctctcatgagtctcagaaccgcaccagcagccaaccttgccagcaggattcctgcagcctctgcggcagccatgaacctagccagcgccaggacacctgccattccaacagcagtgaacctggctgactctcgaacgccagctgcagcagcggccatgaacttggccagccccagaacagcggtggcaccttcggctgtgaacctggctgaccctcgcactcccacagccccagctgtgaacctagcaggggccagaaccccagctgccttggcagctctgagtctcacaggctctggcacaccaccaactgctgcaaactatccctccagctccagaacaccacaggctccagcctctgcaaacctggtgggtcctcggtctgcacatgccacagctcctgtgaatattgccggctccagaaccgccgcagccttggcccccgcgagcctcaccagtgctaggatggctccagcattgtctggtgcaaacctcaccagccccagggtgcccctttctgcctacgagcgtgtcagtggcagaacctcaccaccgctccttgaccgagctaggtccagaacaccaccgtctgccccaagccaatctaggatgacctctgaacgggctccctccccttcctctagaatgggccaggctccttcacagtctcttctccctccagcacaggatcagccgaggtctcctgtgccttctgctttttcagaccaatcccgttgtttgattgcccagaccacccctgtagcagggtctcagtccctttcctctggggcagtggcaacgaccacgtcctctgctggtgatcacaatggcatgctctctgtccctgcccctggggtgccccactctgatgtgggggagccacctgcctctactggggcccagcagccttctgcattagccgccctgcagccagcaaaggagcggcggagttcctcctcgtcgtcgtcgtcctctagctcctcctcttcttcatcatcgtcgtcgtcgtcctcctcctcctctggctccagttctagtgactcagagggctctagccttcctgtgcaacctgaggtggcactgaagagggtccccagccccaccccagccccaaaggaggctgttcgagagggacgtcctccggagccaaccccagccaaacggaagaggcgctctagcagttccagttccagctcctcctcttcatcttcctcctcctcctcctcctcctcttcttcctcctcctcttcctcttcttcttcttcctcctcatcttcctcctcctcgtcgtcttcctccccttcccctgctaagcctggccctcaggccttgcccaaacctgcaagccccaagaagccaccccctggcgagcggaggtcccgcagcccccggaagccaatagactccctcagggactctcggtccctcagctactcgcctgtggagcgtcgccgtccctcgccccagccctcaccacgggaccagcagagcagcagcagtgagcggggttcccggagaggccagcgtggggacagccgctcccccagccacaagcgcaggagggagacacctagccctcggcccatgagacaccgctcctccaggtctccataaattgtctttgggggattccaccacacccaatgctctggagccacaaggagtgtcccttcttccccagcagagccgtgggagggtccttgtctgctctcctttgaaccttggcagcccttggatggagggctccctttccctccccttttttttttctttgttcctgtgaaatgttaatctccgtgagttcttcctggttcatgtgttctggggggtttggggtgggagggaatgcagatgggagttgggggaggggaggatacagttcaggataccccagcctggagtcagggccagggaggcatggccccacttgtatccagaagttcccaggggtgattgtgatggtggttgggactggaggttgtataaggtgttcttggaaggaaggggcaggagttggaattagttggtccctactgtcccccatgaggttgtgaacccctccccccaacttttcatgtttcttaaaggcattttggttttttaaaatctgtacagcaagagcaactttttctgtcaaataaaaatgagaaatgcaggaaaaaaaaaaaaaaaaaaaaaaaaaaaa

SEQ ID NO: 48 - protein, 2752 aa, Homo sapiens
MYNGIGLPTPRGSGTNGYVQRNLSLVRGRRGERPDYKGEEELRRLEAALVKRPNPDILDHERKRRVELRCLELEEMMEEQGYEEQQIQEKVATFRLMLLEKDVNPGGKEETPGQRPAVTETHQLAELNEKKNERLRAAFGISDSYVDGSSFDPQRRAREAKQPAPEPPKPYSLVRESSSSRSPTPKQKKKKKKKDRGRRSESSSPRRERKKSSKKKKHRSESESKKRKHRSPTPKSKRKSKDKKRKRSRSTTPAPKSRRAHRSTSADSASSSDTSRSRSRSAAAKTHTTALAGRSPSPASGRRGEGDAPFSEPGTTSTQRPSSPETATKQPSSPYEDKDKDKKEKSATRPSPSPERSSTGPEPPAPTPLLAERHGGSPQPLATTPLSQEPVNPPSEASPTRDRSPPKSPEKLPQSSSSESSPPSPQPTKVSRHASSSPESPKPAPAPGSHREISSSPTSKNRSHGRAKRDKSHSHTPSRRMGRSRSPATAKRGRSRSRTPTKRGHSRSRSPQWRRSRSAQRWGRSRSPQRRGRSRSPQRPGWSRSRNTQRRGRSRSARRGRSHSRSPATRGRSRSRTPARRGRSRSRTPARRRSRSRTPTRRRSRSRTPARRGRSRSRTPARRRSRTRSPVRRRSRSRSPARRSGRSRSRTPARRGRSRSRTPARRGRSRSRTPARRSGRSRSRTPARRGRSRSRTPRRGRSRSRSLVRRGRSHSRTPQRRGRSGSSSERKNKSRTSQRRSRSNSSPEMKKSRISSRRSRSLSSPRSKAKSRLSLRRSLSGSSPCPKQKSQTPPRRSRSGSSQPKAKSRTPPRRSRSSSSPPPKQKSKTPSRQSHSSSSPHPKVKSGTPPRQGSITSPQANEQSVTPQRRSCFESSPDPELKSRTPSRHSCSGSSPPRVKSSTPPRQSPSRSSSPQPKVKAIISPRQRSHSGSSSPSPSRVTSRTTPRRSRSVSPCSNVESRLLPRYSHSGSSSPDTKVKPETPPRQSHSGSISPYPKVKAQTPPGPSLSGSKSPCPQEKSKDSLVQSCPGSLSLCAGVKSSTPPGESYFGVSSLQLKGQSQTSPDHRSDTSSPEVRQSHSESPSLQSKSQTSPKGGRSRSSSPVTELASRSPIRQDRGEFSASPMLKSGMSPEQSRFQSDSSSYPTVDSNSLLGQSRLETAESKEKMALPPQEDATASPPRQKDKFSPFPVQDRPESSLVFKDTLRTPPRERSGAGSSPETKEQNSALPTSSQDEELMEVVEKSEEPAGQILSHLSSELKEMSTSNFESSPEVEERPAVSLTLDQSQSQASLEAVEVPSMASSWGGPHFSPEHKELSNSPLRENSFGSPLEFRNSGPLGTEMNTGFSSEVKEDLNGPFLNQLETDPSLDMKEQSTRSSGHSSSELSPDAVEKAGMSSNQSISSPVLDAVPRTPSRERSSSASSPEMKDGLPRTPSRRSRSGSSPGLRDGSGTPSRHSLSGSSPGMKDIPRTPSRGRSECDSSPEPKALPQTPRPRSRSPSSPELNNKCLTPQRERSGSESSVDQKTVARTPLGQRSRSGSSQELDVKPSASPQERSESDSSPDSKAKTRTPLRQRSRSGSSPEVDSKSRLSPRRSRSGSSPEVKDKPRAAPRAQSGSDSSPEPKAPAPRALPRRSRSGSSSKGRGPSPEGSSSTESSPEHPPKSRTARRGSRSSPEPKTKSRTPPRRRSSRSSPELTRKARLSRRSRSASSSPETRSRTPPRHRRSPSVSSPEPAEKSRSSRRRRSASSPRTKTTSRRGRSPSPKPRGLQRSRSRSRREKTRTTRRRDRSGSSQSTSRRRQRSRSRSRVTRRRRGGSGYHSRSPARQESSRTSSRRRRGRSRTPPTSRKRSRSRTSPAPWKRSRSRASPATHRRSRSRTPLISRRRSRSRTSPVSRRRSRSRTSVTRRRSRSRASPVSRRRSRSRTPPVTRRRSRSRTPTTRRRSRSRTPPVTRRRSRSRTPPVTRRRSRSRTSPITRRRSRSRTSPVTRRRSRSRTSPVTRRRSRSRTSPVTRRRSRSRTPPAIRRRSRSRTPLLPRKRSRSRSPLAIRRRSRSRTPRTARGKRSLTRSPPAIRRRSASGSSSDRSRSATPPATRNHSGSRTPPVALNSSRMSCFSRPSMSPTPLDRCRSPGMLEPLGSSRTPMSVLQQAGGSMMDGPGPRIPDHQRTSVPENHAQSRIALALTAISLGTARPPPSMSAAGLAARMSQVPAPVPLMSLRTAPAANLASRIPAASAAAMNLASARTPAIPTAVNLADSRTPAAAAAMNLASPRTAVAPSAVNLADPRTPTAPAVNLAGARTPAALAALSLTGSGTPPTAANYPSSSRTPQAPASANLVGPRSAHATAPVNIAGSRTAAALAPASLTSARMAPALSGANLTSPRVPLSAYERVSGRTSPPLLDRARSRTPPSAPSQSRMTSERAPSPSSRMGQAPSQSLLPPAQDQPRSPVPSAFSDQSRCLIAQTTPVAGSQSLSSGAVATTTSSAGDHNGMLSVPAPGVPHSDVGEPPASTGAQQPSALAALQPAKERRSSSSSSSSSSSSSSSSSSSSSSSSSGSSSSDSEGSSLPVQPEVALKRVPSPTPAPKEAVREGRPPEPTPAKRKRRSSSSSSSSSSSSSSSSSSSSSSSSSSSSSSSSSSSSSSSSSSPSPAKPGPQALPKPASPKKPPPGERRSRSPRKPIDSLRDSRSLSYSPVERRRPSPQPSPRDQQSSSSERGSRRGQRGDSRSPSHKRRRETPSPRPMRHRSSRSP

SEQ ID NO: 49 - DNA, 7312 bp, Homo sapiens
gtggcattgggaggcccggcctgggggaggagacggcgttccgttagcggcgttggggtttggctgcagtggcagtgctttctcttctgctcacggggacccgctcaggctggaggccagccagctcttgccgccacctcggtcgcgatgggggcgcaggaccggccgcagtgccacttcgacatcgagatcaaccgggagccggttggtcgcattatgtttcagctcttctcagacatatgtccaaaaacatgcaaaaacttcctttgcttgtgctcaggagagaaaggccttgggaaaacaactgggaagaagttatgttataaaggttctacgttccatcgtgtggttaaaaactttatgattcagggtggggacttcagtgaaggtaatggaaaaggtggagaatcaatttatggtggatattttaaagatgaaaactttattctcaaacatgacagagcgttccttttatcaatggcaaatcgagggaaacataccaatggttcccagtttttcattaccacaaagcctgctccacacctggatggggtgcatgtagtctttggactggttatttctggttttgaagtaatcgaacaaattgaaaatctgaagaccgatgctgcaagcagaccatatgcagatgtgcgagttattgactgtggagtacttgccacaaaatcaataaaagatgtttttgagaaaaaaaggaagaaaccaactcattcagaaggctcggattcctcttccaattcctcctcttcttcagaatcatcttcagaaagtgaacttgaacatgagagaagcagaaggaggaaacataagaggaggccaaaagttaaacgttctaaaaagaggcgaaaggaagcaagcagttcagaagagccaaggaataaacatgcaatgaacccaaaaggtcactctgagaggagtgataccaatgaaaaaaggtcagttgattccagtgctaaaagggaaaaacctgtggtccgcccagaagagattcctccagtgcctgagaaccgatttttactgagaagagatatgcctgttgttactgcagaacctgaaccgaagattcctgatgttgcacccattgtaagtgatcagaaaccatctgtatcaaagtctggacggaagattaaaggaaggggcacaattcgctatcacacacctccaagatcaagatcctgttctgagtcagatgatgatgacagcagtgaaactcctcctcactggaaagaggaaatgcagagattaagagcatatagaccacctagtggagaaaaatggagtaaaggagataagttaagtgacccctgttcaagccgatgggatgaaagaagcttgtctcagagatccagatcatggtcctataatggatattattcagaccttagtacagcaagacactctggccaccataaaaaacgcagaaaagaaaaaaaggttaagcataaaaagaaagggaaaaagcagaaacactgcagaagacacaaacaaacaaagaagagaaggattcttataccgtctgacatagaatcctcaaaatcttccactcgaagaatgaaatcctcttgtgatagagaaaggagttctcgttcttcctcattgtcatctcatcactcatcaaagagagactggtctaaatctgataaggatgtccagagctctttaacccattccagcagagactcatacagatcaaaatctcactcacagtcttattctagaggaagctcaagatcaaggactgcgtcaaagtcctcatcacattctcgaagtagatcaaagtccagatctagttccaagtctgggcaccgaaagagagcatcaaaatcaccaagaaaaacagcttctcagttaagtgaaaataaaccagttaaaacagaacctttaagagcaaccatggcacaaaatgaaaatgtagtagtacaaccagttgtagcagaaaatattcctgtaataccactgagtgacagtccccccccttcaagatggaagcctggacagaaaccttggaagccctcttatgagcgaattcaggaaatgaaagctaaaacaacccatttgctacccatccaaagcacttacagtttagcaaatattaaagagactggtagctcatcatcctaccataaaagagaaaaaaattcggaaagtgatcagagcacttattcaaaatacagtgatagaagttcagaaagctcaccaaggtcaaggagcagatcttctaggagtagatcttattccagatcatatacaagatcacgtagtctagctagttcacattcaaggtctaggtctccatcatctagatctcattcacgaaataaatacagtgatcattcacagtgtagtagatcatcttcatatacttctattagcagtgatgatggaaggcgagctaagaggagacttagatccagtgggaaaaaaaatagcgtttcacataaaaagcatagcagcagctctgaaaagacacttcacagtaaatatgtcaaaggtagagacaggtcttcatgtgtgagaaagtatagcgagagcagatcatctttagattattcttcagacagtgagcagtcaagtgttcaggccacacagtcagcccaggaaaaagagaagcagggccaaatggaaagaacacataataaacaagaaaaaaacagaggtgaagaaaaatccaagtctgaacgggaatgccctcattcaaaaaaaagaactttgaaagagaatctttctgatcaccttagaaatggcagtaagcccaaaaggaagaattatgctggtagtaaatgggactctgagtcaaattcagaacgagatgtcactaaaaacagtaaaaatgactcccatccatcctctgacaaggaagaaggtgaggccacatccgattctgaatcagaggttagtgaaattcacatcaaagtcaaacccacaaccaagtcgtccacaaatacttcactgcctgatgataatggtgcttggaaatcaagcaaacagcgcacatcaacttctgactctgaggggtcctgttccaattcggaaaacaataggggaaagccacaaaagcacaaacatgggtcaaaggaaaatcttaaaagagaacacaccaaaaaagtgaaagagaaattgaaagggaaaaaagacaaaaagcataaggctccaaaacgaaagcaagcatttcactggcagcctccactagaatttggtgaagaggaggaggaggagattgatgacaagcaagttactcaggaatcaaaagagaaaaaagtttctgaaaacaatgaaaccataaaagataatattctaaaaactgagaaatccagtgaagaggacctttcaggtaaacatgatacagtgactgtttcatcagatcttgatcagtttactaaagatgatagtaaactcagtatttctcccacagctttaaatactgaggaaaatgtggcctgtttacaaaacattcagcacgttgaagaaagtgttcccaatggagtggaagatgtgcttcaaacagatgacaacatggagatctgcactcctgataggagttccccagcaaaagtagaggagacttcccctctaggaaatgcacggcttgataccccagatataaacattgttttgaagcaggatatggcaacggaacatcctcaagcagaggtagtaaaacaggaaagcagcatgtccgaaagtaaagtgttgggtgaagtggggaaacaggacagcagctctgctagcttggctagtgctggagaaagtaccgggaagaaggaggtggctgagaagagccagatcaacctcattgataagaaatggaagcccctgcaaggtgtggggaacctggcagcacctaatgctgccacatccagtgctgtggaagttaaggtgttgaccactgtgcctgaaatgaaaccacaaggcttgagaatagaaattaaaagcaaaaataaagttcggcctgggtctctctttgatgaagtaagaaagacagcacgcttaaaccgtagaccaagaaatcaggagagttcaagtgatgagcagacgcctagtcgggatgatgatagccagtccaggagtccaagtagatctcgaagtaaatctgaaaccaaatcaagacacagaacaaggtctgtctcctatagtcactcaagaagtcgatcgagaagttccacatcatcttatcgatcaagaagctactctagaagtcggagcagaggatggtacagcagaggccgaaccagaagccggagcagttcctaccggagttacaaaagtcacaggacgtccagcaggagcagatccaggagcagctcatatgatccccacagtcgatccaggtcctacacctacgatagctactatagcaggagtcggagtcgaagtagaagccagagaagtgacagttaccaccgaggcagaagttataatcggcggtccaggagttgtagatcttatggctctgacagtgaaagtgaccgaagttactctcatcaccggagccccagtgagagcagcagatacagttgaaaacgtccggatacaaattatatcttatttgtaaatatctggcaacttagcttaagaaatgtaatgacagtctgttgttctatttcaatatcagaggtgaatttcaaaaatagacacttcttaattgttactggttcatttacatgtggggagaagaatttaaaatacagatatgtctcctaaaaatatttttatgccacattttacagtagccaactatggaaatgaatttcattttcttgaatcaagaaatcgtgaaatttatctatgtataatttgcaatattattttaagtctatttcactctatcttacgtatcccttagaatacagattctttttgcctgtttttccagttttagcatatatgctgccaagcatagaactgtgaaggagaactgttaaaggcggccaaatatttatatactgattacatagagtcttgtacatatgtgctctaaaaacaaaccacccagaattgatactgttggtaaccaggagtataaggcagtggctctggggttcttaattcattcctaacttctttgatacttcacaggattaggaaagtggtcatcatacatcccacacagtctgtattacttcaggcttgtgggcaaggttaggaagaatcaatcagccttaactataaatacctgcactgtctctgaggacttactattttatgttctttttaatcaataccgatcagaagtttaggttataaaaacaattctacttcatgctttggtgcttggtaatttttggtgcgtctttaagcattactcttatatatcatatattaaaataccataaaaatgaaattcagacaaaatcactggcaccaaaaatggtttattctgagctgtcttcactttgactatttggggggcttctctcaagtacagatgtgggttggggtcccctggagcaggcaggattggcagtaagagatattggccactcaagtctactgtgtgtgtgtgcctctggaagagtgaagaatggacttcaaaagtaacatcaaaaatctaactgccaccatcctggagacattttgcagggctttcctttcaagtctttcaagtacaggatattaccacaacagcagctgaactgttgtaaccagcatgtttttcctatttccactgtgacctgcagctgactcaaagccttgcgtgacctgacccaggtgcaagagacaggggaagagggatagagggtatagcataaattacatattttcatggctttgggtggttcctccaaaaataattggacctgtaaaaactagtgtgtgtgtgtgtgtgtgtgtgtgtgtgtgtgtggtttttttttttaatctttactttgaatttgttccccaagtgtacttaatcaccttagtgccagtttaatccagttatgcagaagaaattcatattggttgcctgatgtagagctcagcaccaccctaccacaggccttgtctggtgtatttgggaagtggaaaagagccctcagttggagggagctgacaacccttggtggagggagggtgcccttgaatgtattaaaactatcacccaaagaaggtatgaaaacagggtaaggtggtcagttgtttgccaggtcaatagacagaaagtacattagaaaacaggacttaggccaaacaaacaatactggatactgaatacaaaacagtatgatttatattaaaggtttccaaaggttgcctgcaaaggagaatattactactagtcagcaggaaaaaaatgcattcagaacccaagcagaaactgccaaatgtaattaggttaagaaaagttacccttgggcagtgtattagttttctattgctgtgtgacaaattaccccaaatttagcagtttaaaaaacaatacccatagcagttctgtagctcatgagtctggcacagtgtggctggattctctgctcagggtcttaaaggctgaaataagggttggcaggacaacattccttcatggaggctctggggaagaatctgcttctaagttcattcaggttgttggcggaattcagttctttgctggctctcagctggaggcccctctctcacctcaaggctgcctgcattccttcttatgtggtcccctccagcttcaaaccagccttcctgctctttctcatgcttcatatctctctcccgtcctcctgttttaggggcatatgattagctcaagcccacagatatattttaaggttgattgtgcgatagaacataattgcaggagtactgtctcatctcatcatattcacgggttctggagattagctcattgaaagtgggaggggcattttcaaattctgcctaccacaggcaataactgcccatctcagctgtaggtggaatttttacccagaaaagataggccctagaagcctcatttcttttctccatggaaaaggacagccctctgctgcagcgttcaacttgtgtgtttactgacagagtgaactacagaaatagcttttcttcctaaaggggattgttctacattttgaagttattttttaataaaattgaattatgttgtgtattgtgcttcttaataggaaatgcattattggactgtttttgtaacatcctgtttattgcaaatagctagtatcgttcaaaaactgtataaaatacttttgtacatattagcaatgtctaatttgtatacacttcagttaaatttccctaaaacttgaaaggggaccttgtagaaattaaaatatatacttagtctaagtctgaaaaaaaaaaa

SEQ ID NO: 50 - protein, 1462 aa, Homo sapiens
MGAQDRPQCHFDIEINREPVGRIMFQLFSDICPKTCKNFLCLCSGEKGLGKTTGKKLCYKGSTFHRVVKNFMIQGGDFSEGNGKGGESIYGGYFKDENFILKHDRAFLLSMANRGKHTNGSQFFITTKPAPHLDGVHVVFGLVISGFEVIEQIENLKTDAASRPYADVRVIDCGVLATKSIKDVFEKKRKKPTHSEGSDSSSNSSSSSESSSESELEHERSRRRKHKRRPKVKRSKKRRKEASSSEEPRNKHAMNPKGHSERSDTNEKRSVDSSAKREKPVVRPEEIPPVPENRFLLRRDMPVVTAEPEPKIPDVAPIVSDQKPSVSKSGRKIKGRGTIRYHTPPRSRSCSESDDDDSSETPPHWKEEMQRLRAYRPPSGEKWSKGDKLSDPCSSRWDERSLSQRSRSWSYNGYYSDLSTARHSGHHKKRRKEKKVKHKKKGKKQKHCRRHKQTKKRRILIPSDIESSKSSTRRMKSSCDRERSSRSSSLSSHHSSKRDWSKSDKDVQSSLTHSSRDSYRSKSHSQSYSRGSSRSRTASKSSSHSRSRSKSRSSSKSGHRKRASKSPRKTASQLSENKPVKTEPLRATMAQNENVVVQPVVAENIPVIPLSDSPPPSRWKPGQKPWKPSYERIQEMKAKTTHLLPIQSTYSLANIKETGSSSSYHKREKNSESDQSTYSKYSDRSSESSPRSRSRSSRSRSYSRSYTRSRSLASSHSRSRSPSSRSHSRNKYSDHSQCSRSSSYTSISSDDGRRAKRRLRSSGKKNSVSHKKHSSSSEKTLHSKYVKGRDRSSCVRKYSESRSSLDYSSDSEQSSVQATQSAQEKEKQGQMERTHNKQEKNRGEEKSKSERECPHSKKRTLKENLSDHLRNGSKPKRKNYAGSKWDSESNSERDVTKNSKNDSHPSSDKEEGEATSDSESEVSEIHIKVKPTTKSSTNTSLPDDNGAWKSSKQRTSTSDSEGSCSNSENNRGKPQKHKHGSKENLKREHTKKVKEKLKGKKDKKHKAPKRKQAFHWQPPLEFGEEEEEEIDDKQVTQESKEKKVSENNETIKDNILKTEKSSEEDLSGKHDTVTVSSDLDQFTKDDSKLSISPTALNTEENVACLQNIQHVEESVPNGVEDVLQTDDNMEICTPDRSSPAKVEETSPLGNARLDTPDINIVLKQDMATEHPQAEVVKQESSMSESKVLGEVGKQDSSSASLASAGESTGKKEVAEKSQINLIDKKWKPLQGVGNLAAPNAATSSAVEVKVLTTVPEMKPQGLRIEIKSKNKVRPGSLFDEVRKTARLNRRPRNQESSSDEQTPSRDDDSQSRSPSRSRSKSETKSRHRTRSVSYSHSRSRSRSSTSSYRSRSYSRSRSRGWYSRGRTRSRSSSYRSYKSHRTSSRSRSRSSSYDPHSRSRSYTYDSYYSRSRSRSRSQRSDSYHRGRSYNRRSRSCRSYGSDSESDRSYSHHRSPSESSRYS

SEQ ID NO: 51 - DNA, 3827 bp, Homo sapiens
tatgatctcgtgaaatcttgagagaaactgaatgacgaatgaaactattgttcctgtttcacacagaagaaaactgaggttaaaaggggtaaagtaattttgcatggcatgaagtagaaattcaaagtacaggaatttgaacttggttctgtccttttctgaagcccttgaccactatagactcaaacatcaccttgtttttccactcattcaacacttttttttttaaattatctaataggttggcactcatcatgagcccctgttctcattctgcaaatggtgaagctctctattgtcctgaccccacagttcctgtcccatgaccagggccagctcaccaaggagctgcagcagcatgtaaagtcagtgacatgcccatgcgagtacctgaggaaggttatcaatactctggctgaccatcatcatcgtgggactgactttggtggaagtccttggttacatgtcattattgcgtttccgacaagttataaagttgtcattaccctctggatagtttacctttgggtgtctctcctgaagactatcttctggtctcgaaatggacatgatggatccacggatgtacagcagagagcctggaggtccaaccgccgtagacaggaagggctgaggtccatttgtatgcacacaaagaaaagagtttcttcctttcgaggaaataaaattggcctgaaagacgtcattactctacggagacatgtggaaacaaaagttagagctaaaatccgtaagaggaaggtgacaacgaaaatcaaccatcatgacaaaatcaatggaaagaggaagaccgccagaaaacagaaaatgtttcaacgtgcgcaagagttgcggcggcgagcagaggactaccacaaatgcaaaatccccccttctgcaagaaaggctctttgcaactgggtcagaatggcggcagcggagcatcgtcattcttcaggattgccctactggccctacctcacagctgaaactttaaaaaacaggatgggccaccagccacctcctccaactcaacaacattctataactgataactccctgagcctcaagacacctcccgagtgtctgctcactccccttccaccctcagcggatgataatctcaagacacctcccgagtgtgtgctcactccccttccaccctcagcggatgataatctcaagacacctcccgagtgtgtgctcactccccttccaccctcagcggatgataatctcaagacacctcctgagtgtctgctcactccccttccaccctcagcggatgataatctcaagacacctcccgagtgtctgctcactccccttccaccctcagctctaccctcagctccaccctcagcggatgataatctcaagacacgtgccgagtgtctgctccatccccttccaccctcagcggatgataatctcaagacaccttccgagcgtcagctcactccccttccaccctcagctccaccctcagcagatgataatatcaagacacctgccgagcgtctgcgggggccgcttccaccctcagcggatgataatctcaagacaccttccgagcgtcagctcactccccttccaccctcagctccaccctcagcagatgataatatcaagacacctgctgagcgtctgcgggggccgcttccaccctcagcggatgataatctcaagacaccttccgagcgtcagctcactccccttccaccctcagctccaccctcagcagatgataatatcaagacacctgccgagcgtctgcgggggccgcttccaccctcagcggatgataatctcaagacaccttccgagcgtcagctcactgcccttccaccctcagcagatgataatatcaagacacctgccgagcgtctgcgggggccgcttccaccctcagcggatgataatctcaagacaccttccgagcgtcagctcactccccttccaccctcagctccaccctcagcagatgataatatcaagacacctgccttccaccctcagcggatgatctcaagacaccttccgagcgtcagctcactccccttccaccctcagctccaccctcagcagatgataatatcaagatacctgctgagcgtctgcggattccgcttccaccatcagccgatgataatctcaagacaccttccgagcgtcagctcactccccttccaccctcagctccaccctcagcagatgataatatcaagacacctgccgagcgtctgcgggggccgcttccaccctgagcggatgataatctcaagacaccttccgagcgtcagctcactccccttccaccctcagctccaccctcagcagatgataatatcaagacacctgccgagcgtctgcgggggccgcttccaccctcagcagatgataatctcaagacaccttccgagcgtcagctcactccccttccaccctcagctccaccctcagcagatgataatatcaagacacctgccgagcgtctgcgggggccgcttccaccctcagcggatgataatctcaagacaccttccgagcgtcagctcactccccttccaccctcagctccaccctcagcagatgataatatcaagacacctgccgagcgtctgcgggggccgcttccaccctcagcagatgataatctcaagacaccttccgagcgtcagctcactccccttccaccctcagctccaccctcagcagatgataatatcaagacacctgccgagcgtctgcgggggccgcttccaccctcagcggatgataatctcaagacaccttccgagcgtcagctcactccctttccaccctcagctccaccctcagcagatgataatatcaagacacctgccgagcgtctgcggggagcgtctgcgggggccgcttccaccctcagcggatgataatctcaagacaccttccgagcgtcagctcactccccttccaccctcagctccaccctcagcagatgataatatcaagacacctgccgagcgtctgcgggggccgcttccaccctcagcggatgataatctcaagacaccttccgagcgtcagctcactccccttccaccctcagctccaccctcagcagatgataatatcaagacacctgccgagcgtctgcgggggccgcttccaccctcagcggatgataatctcaagacaccttccgagcgtcagctcactccccttccaccctcagctccaccctcagcagatgataatatcaagacacctgccgagcgtctgcgggggccgcttccaccctcagccgatgataatctcaagacacctcccttagctactcaggaggctgaggcagaaaaaccacgcaaacccaagaggcagagggcggctgagatggaaccacctcccgaacccaagaggcggagggtcggtgacgtggaaccgtcacgcaaacccaagaggcggagggccgctgacgtggaaccatcatcacccgaacccaagaggcggagggtcggtgatgtggaaccgtcacgcaaacccaagaggcggagggccgctgacgtggaaccatcatcacccgaacccaagaggcggagggtcggtgacgtggaaccgtcacgcaaacccaagaggcggagggccgctgacgtggaaccatcattacccgaacccaagaggcggaggttgagctgagaagaggccagtgcactcaagcctgagcaataagaataaaaccgagtagaacaaaataaaaaattcaaaaaacaaaacaaaacccacactccaaaaactaacaaagaataaataaataatataaaaataaaataaaaaaaaaaaaa

SEQ ID NO: 52 - protein, 1133 aa, Homo sapiens
MVKLSIVLTPQFLSHDQGQLTKELQQHVKSVTCPCEYLRKVINTLADHHHRGTDFGGSPWLHVIIAFPTSYKVVITLWIVYLWVSLLKTIFWSRNGHDGSTDVQQRAWRSNRRRQEGLRSICMHTKKRVSSFRGNKIGLKDVITLRRHVETKVRAKIRKRKVTTKINHHDKINGKRKTARKQKMFQRAQELRRRAEDYHKCKIPPSARKALCNWVRMAAAEHRHSSGLPYWPYLTAETLKNRMGHQPPPPTQQHSITDNSLSLKTPPECLLTPLPPSADDNLKTPPECVLTPLPPSADDNLKTPPECVLTPLPPSADDNLKTPPECLLTPLPPSADDNLKTPPECLLTPLPPSALPSAPPSADDNLKTRAECLLHPLPPSADDNLKTPSERQLTPLPPSAPPSADDNIKTPAERLRGPLPPSADDNLKTPSERQLTPLPPSAPPSADDNIKTPAERLRGPLPPSADDNLKTPSERQLTPLPPSAPPSADDNIKTPAERLRGPLPPSADDNLKTPSERQLTALPPSADDNIKTPAERLRGPLPPSADDNLKTPSERQLTPLPPSAPPSADDNIKTPAFHPQRMISRHLPSVSSLPFHPQLHPQQMIISRYLLSVCGFRFHHQPMIISRHLPSVSSLPFHPQLHPQQMIISRHLPSVCGGRFHPERMIISRHLPSVSSLPFHPQLHPQQMIISRHLPSVCGGRFHPQQMIISRHLPSVSSLPFHPQLHPQQMIISRHLPSVCGGRFHPQRMIISRHLPSVSSLPFHPQLHPQQMIISRHLPSVCGGRFHPQQMIISRHLPSVSSLPFHPQLHPQQMIISRHLPSVCGGRFHPQRMIISRHLPSVSSLPFHPQLHPQQMIISRHLPSVCGERLRGPLPPSADDNLKTPSERQLTPLPPSAPPSADDNIKTPAERLRGPLPPSADDNLKTPSERQLTPLPPSAPPSADDNIKTPAERLRGPLPPSADDNLKTPSERQLTPLPPSAPPSADDNIKTPAERLRGPLPPSADDNLKTPPLATQEAEAEKPRKPKRQRAAEMEPPPEPKRRRVGDVEPSRKPKRRRAADVEPSSPEPKRRRVGDVEPSRKPKRRRAADVEPSSPEPKRRRVGDVEPSRKPKRRRAADVEPSLPEPKRRRLS

SEQ ID NO: 53 - DNA, 1807 bp, Homo sapiens
ctctgagtcaccaacctgaggctgccccggccgcctgcgcacccggcagcaccatgacagatcaggcctttgtgacactaaccacaaacgatgcctacgccaaaggtgccctggtcctgggatcatctctgaaacagcacaggaccaccaggaggctggtcgtgctcgccacccctcaggtctcagactccatgagaaaagttttagagacagtctttgatgaagtcatcatggtagatgtcttggacagtggcgattctgctcatctaaccttaatgaagaggccagagttgggtgtcacgctgacaaagctccactgctggtcgcttacacagtattcaaaatgtgtattcatggatgcagatactctggtcctagcaaatattgatgatctttttgacagagaagaattgtcagcagcaccagacccagggtggcctgactgcttcaattccggagtcttcgtttatcagccttcagttgaaacatacaatcagctgttgcatcttgcttctgagcaaggtagttttgatggtggggaccaaggcatactgaacacattttttagcagctgggcaacaacagatatcagaaaacacctgccgtttatttataacctaagcagcatctctatatactcctacctcccggcatttaaagtgtttggtgcaagtgccaaagttgtgcatttcctgggacgagtcaaaccatggaattatacttatgatcccaaaacaaaaagtgtcaaaagtgaggcccatgatcccaacatgactcatccagagtttctcatcctgtggtggaacatctttaccaccaacgttttacctctgcttcaacaatttggccttgtcaaagacacctgctcatatgtaaatgtgctttcagacttggtctatacactggctttctcttgtggcttctgtagaaaggaagatgtctcaggagccatatcacatctgtcccttggggagatcccagctatggcacagccgtttgtatcctcggaagaacggaaggaacgatgggaacagggccaggctgattatatgggagcagattcctttgacaacatcaagaggaaacttgacacttacctccagtagaaacactgcatttttctgtgaacacatccacttcacaagccttgtttctgatacttagtatctagagctgggttgagaaaagtctgttacagttgctagaggttttcattaaaacttatcagatgagaggcttttttaggataagaggtgagaactgggcaaaagttgtgaagcagcaattctgttatatggacagtgttctgctttttaatcctatttagcttgtttcagaaattctcacttttgttgactgccaacatacaaagtaagggaaactcaagatattaagatggctgtatcagttcttaaaatctgcagagcctggttcaaaatcagtcactcccttcagaagcagacatggcatctgttccttgcttgcttgttggttgtgtacctttcacgagacctgaattttagaattgcccagtgctgccagagtgagtgagtgtaattctcctttcaggtaaagataggctatctcaacactgctgagtgattcataaacatatcaaccaatagcattaacccattttatttcctgtccttagtgtctgaagatgctcaccagttttctgtgtacagtaaggcagcatgctaaaatgcttttgttcagttctggatatttgaaaatagcagtgtgttctctgatggttacctgcagtggcaccctgtacaaaaaataaaagacttattggtgtaaa

SEQ ID NO: 54 - protein, 350 aa, Homo sapiens
MTDQAFVTLTTNDAYAKGALVLGSSLKQHRTTRRLVVLATPQVSDSMRKVLETVFDEVIMVDVLDSGDSAHLTLMKRPELGVTLTKLHCWSLTQYSKCVFMDADTLVLANIDDLFDREELSAAPDPGWPDCFNSGVFVYQPSVETYNQLLHLASEQGSFDGGDQGILNTFFSSWATTDIRKHLPFIYNLSSISIYSYLPAFKVFGASAKVVHFLGRVKPWNYTYDPKTKSVKSEAHDPNMTHPEFLILWWNIFTTNVLPLLQQFGLVKDTCSYVNVLSDLVYTLAFSCGFCRKEDVSGAISHLSLGEIPAMAQPFVSSEERKERWEQGQADYMGADSFDNIKRKLDTYLQ

SEQ ID NO: 55 - DNA, 2261 bp, Homo sapiens
ggggctttgcggctgtcgtcaagcgcggcgttgggccggcgggcgggggctgaggggctgccatggcggcggcgggccggctcccgagctcctgggccctcttctcgccgctcctcgcagggcttgcactactgggagtcgggccggtcccagcgcgggcgctgcacaacgtcacggccgagctctttggggccgaggcctggggcacccttgcggctttcggggacctcaactccgacaagcagacggatctcttcgtgctgcgggaaagaaatgacttaatcgtctttttggcagaccagaatgcaccctattttaaacccaaagtaaaggtatctttcaagaatcacagtgcattgataacaagtgtagtccctggggattatgatggagattctcaaatggatgtccttctgacatatcttcccaaaaattatgccaagagtgaattaggagctgttatcttctggggacaaaatcaaacattagatcctaacaatatgaccatactcaataggacttttcaagatgagccactaattatggatttcaatggtgatctaattcctgatatttttggtatcacaaatgaatccaaccagccacagatactattaggagggaatttatcatggcatccagcattgaccactacaagtaaaatgcgaattccacattctcatgcatttattgatctgactgaagattttacagcagatttattcctgacgacattgaatgccaccactagtaccttccagtttgaaatatgggaaaatttggatggaaacttctctgtcagtactatattggaaaaacctcaaaatatgatggtggttggacagtcagcatttgcagactttgatggagatggacacatggatcatttactgccaggctgtgaagataaaaattgccaaaagagtaccatctacttagtgagatctgggatgaagcagtgggttccagtcctacaagatttcagcaataagggcacactctggggctttgtgccatttgtggatgaacagcaaccaactgaaataccaattccaattacccttcatattggagactacaatatggatggctatccagacgctctggtcatactaaagaacacatctggaagcaaccagcaggcctttttactggagaacgtcccttgtaataatgcaagctgtgaagaggcgcgtcgaatgtttaaagtctactgggagctgacagacctaaatcaaattaaggatgccatggttgccaccttctttgacatttacgaagatggaatcttggacattgtagtgctaagtaaaggatatacaaagaatgattttgccattcatacactaaaaaataactttgaagcagatgcttattttgttaaagttattgttcttagtggtctgtgttctaatgactgtcctcgtaagataacaccctttggagtgaatcaacctggaccttatatcatgtatacaactgtagatgcaaatgggtatctgaaaaatggatcagctggccaactcagccaatccgcacatttagctctccaactaccatacaacgtgcttggtttaggtcggagcgcaaattttcttgaccatctctacgttggtattccccgtccatctggagaaaaatctatacgaaaacaagagtggactgcaatcattccaaattcccagctaattgtcattccataccctcacaatgtccctcgaagttggagtgccaaactgtatcttacaccaagtaatattgttctgcttactgctatagctctcatcggtgtctgtgttttcatcttggcaataattggcattttacattggcaggaaaagaaagcagatgatagagaaaaacgacaagaagcccaccggtttcattttgatgctatgtgacttgcctttaatattacataatggaatggctgttcacttgattagttgaaacacaaattctggcttgaaaaaataggggagattaaatattatttataaatgatgtatcccatggtaattattggaaagtattcaaataaatatggtttgaatatgtcacaaggtctttttttttaaagcactttgtatataaaaatttgggttctctattctgtagtgctgtacatttttgttcctttgtggaatgtgttgcatgtactccagtgtttgtgtatttataatcttatttgcatcatgatgatggaaaaagttgtgtaaataaaaataattaaaaaaaaaaaaaaaaaaaaaaaaaaaaaa

SEQ ID NO: 56 - protein, 612 aa, Homo sapiens
MAAAGRLPSSWALFSPLLAGLALLGVGPVPARALHNVTAELFGAEAWGTLAAFGDLNSDKQTDLFVLRERNDLIVFLADQNAPYFKPKVKVSFKNHSALITSVVPGDYDGDSQMDVLLTYLPKNYAKSELGAVIFWGQNQTLDPNNMTILNRTFQDEPLIMDFNGDLIPDIFGITNESNQPQILLGGNLSWHPALTTTSKMRIPHSHAFIDLTEDFTADLFLTTLNATTSTFQFEIWENLDGNFSVSTILEKPQNMMVVGQSAFADFDGDGHMDHLLPGCEDKNCQKSTIYLVRSGMKQWVPVLQDFSNKGTLWGFVPFVDEQQPTEIPIPITLHIGDYNMDGYPDALVILKNTSGSNQQAFLLENVPCNNASCEEARRMFKVYWELTDLNQIKDAMVATFFDIYEDGILDIVVLSKGYTKNDFAIHTLKNNFEADAYFVKVIVLSGLCSNDCPRKITPFGVNQPGPYIMYTTVDANGYLKNGSAGQLSQSAHLALQLPYNVLGLGRSANFLDHLYVGIPRPSGEKSIRKQEWTAIIPNSQLIVIPYPHNVPRSWSAKLYLTPSNIVLLTAIALIGVCVFILAIIGILHWQEKKADDREKRQEAHRFHFDAM

SEQ ID NO: 57 - DNA, 2225 bp, Homo sapiens
agtgacgtctttgccccgcgccgcgccgtcccacccatctccctggcctccggtcccaacttcgcttctctgctgaccctctctcgtcgccgctgccgccgccgcagctgccaaaatgtctacaggtccaactgctgccactggcagtaatcgaagacttcagcagacacaaaatcaagtagatgaggtggtggacataatgcgagttaacgtggacaaggttctggaaagagaccagaagctctctgagttagacgaccgtgcagacgcactgcaggcaggcgcttctcaatttgaaacgagcgcagccaagttgaagaggaaatattggtggaagaattgcaagatgtgggcaatcgggattactgttctggttatcttcatcatcatcatcatcgtgtgggttgtctcttcatgaagaaccagcggaactcaaaactgctgttcaagaaacctcttcaagacttttgacttagaacctgctatattatcaagcttacctactgttatctctaaaattttttttgtgttaatgtaaagttgaatttctaggaaacgtgcctttgttttttaatatgcactccaaattagaaggccggccccgtccacattttgcacagtgcctttacagatttacgtatgggctgatgaagaggccttcttaagttccagagtgctataatctagatgtaatgttgtcactaattaattgccattactcccagttagttacccttgtcatttggcattattttcagaaccacattttaaacctttgggtaatcagatttccaacttatgccttccagaaaaaaacactactgcctaacacaaatctgtgataacaacaggctgtgccttattttgataattttctgattccctagaagagaaccctctactttttgtaagcactactgactctcgctgtatttaagatgctggtgaagagcttttgctcttgcattagatttgaagatgtttacattgttgttattgttatgtatcacttgctaaaaatattgttttaatcagagataacctctttaaaaaaatttttaaagaactatggctatgaccaaagcttctattttgccaaaaagttaaataccgataaaatggccttaagtgtattcctgacagttaaattcagaaacgtgccaaatggaactcaaggtgccccttcagaattaaaatcattaccttgtgtgtgaaccttctacatcttcataggcctttcttccttttgaaaggctgtagacagtgtggctccccttctgattcagtattttgcatgggggttagagaaggtttgaggtagactctgaccgtctcataaaagagttctacccagcagttggcagattatcagctgtggactccagcatgtttctgataattatgcaagcaacaattctgtagcctcaagtaagaccacctgtgaacttgatcattatctggcccaaatatgaagataaactataactttggagtttgtttcctatttgtattcacattctgcttcctaaatcagttttctaaattatgcctgcaattaggcattggtcaggggtgaatggctcttttcacagagagtagccaaccagagacctttgctttgatatcatcaactgcagagaatgctgttgatgggaatgctggaagcagaaactttgtcatcggaaaaacttttcttgtatgcatgagactcaacatcaggatccacagcttaaagatgggaattcaggtatgaaagaaaacaggcaaggaggcactgagggagaaagacacagactttatcgctctgtggctcattgttactggaatattctaaaactcttgttcacatgctattatgacttataaagcagcaacagctgaggcgcaccaggacacagcttccatttctttaacgtctgttcccttaacatcgctgaaatgatttactgttgaagagatgccttgcggtgtggccagctgtgaggagaaagcagctggcagtgttaggacattagtccaccttcagcgcagggtctctggccgggtctgactcagaaaccttggtactcgccccttggccacagtgcccagacccatgtaacccactggctcctgcattaacccagaaatacctcgcttctatctgtgcacttagctgggaacttacccactgtaatcacctaaataaagtgtttataaacatgaaaaaaaaaaaaaaaaaaaaa

SEQ ID NO: 58 - protein, 100 aa, Homo sapiens
MSTGPTAATGSNRRLQQTQNQVDEVVDIMRVNVDKVLERDQKLSELDDRADALQAGASQFETSAAKLKRKYWWKNCKMWAIGITVLVIFIIIIIVWVVSS

SEQ ID NO: 59 - DNA, 2691 bp, Homo sapiens
agaagcctgaggagccggagagggtgctggctgccgcgcggccgagtgtgttttatggaccatgtgctgctatgtatgcctgaagaagtacttgaaatgcaaatttggggagactttgccatataaatgcttggctggattaagcgcctaattaggatggtttttcaacaagttggagtaagcatgcaatcggtactttggtctaggaagccatatggttcgtctcgaagtatcgtaaggaaaattggtactaatttgtctctgattcagtgtccaagagttcagtttcagattaacagccatgcaacagaatggagtcccagccacccaggagaggatgcagtggcgtcttttgctgatgttggatgggtagccaaagaagaaggagagtgttcagcaagactaaggacagaggtcagatcaaggccaccccttcaggatgaccttcttttctttgagaaggccccaagcagacagatttccttaccagacttgtctcaagaagagcctcagctgaagaccccagcgcgggcaaatgaggaagcactgcagaagatttgcgctctcgaaaatgaacttgctgctctcagagctcagattgccaaaattgtgacccagcaggagcagcaaaatctcactgcaggtgacttagattctaccacatttggtaccataccaccacaccctccacctcccccaccgcccctgcctccccctgcactggggctccaccaaagtacatctgctgttgatctgattaaagaacgaagagagaaaagagccaatgctggaaagactttggttaagaacaatccaaagaaacctgaaatgccaaatatgctagagatccttaaagagatgaacagtgtaaaacttcggtcagtgaagaggtcagagcaagatgtgaagcccaagccagtggatgctactgaccctgctgccctcatagcagaggctctgaaaaagaaatttgcttatcggtatcgaagtgatagccaagatgaagttgaaaaaggaattccaaagtctgaatcagaggccacctcagagagagtgttgtttgggccacacatgttgaagccaacaggaaaaatgaaggctttaattgaaaatgtatcagactcctaatagacaatgagctgcgaaaagactcctggttcccctgttgatttgtgagggccaagtttgctagtagaaatcgacactgtttagtaaatacctctttagtattcagtggtcttcttttcaggctaattagtggattaagcaataatgaaagcactaagtttggttttgcttttgtgagatggtcagctttggtgctctccacaacatgtgtgttctgacatgtttctaatatgtggccagggcgttcagatttccagttttgaaaacaattgtatagatttcacaacacaaaaaggacatttgtggatgttactgcacattttaaattcttaacactaatttatctgtataagtgttttatatgcatatttttggacataaacagtttatgtaaaattagtaatgaatgatggcaacgagggcactgttatcttcgtttgttttcaatgatcatttagcattcaatgatggaacagctggtataacataagttgttggcatgaaatatttgagattggaaacttcttgccttgaacagaacttatatcttagattctctctcacattttcttggagctggggtttgaataggaaccagatgatgttcactgctgaaattccataatgcttcccattgaagggaagttgagaaccaggaaagctgctttcacgtcattgccatccagtactgacagggaagaaagatgtagttttccagtagtgatgaatcaaattattgaattaaatttcttcttaagaagtaaaaactcagaatgtaccatcttgtttcctttcagtttattaaatggcatcataaagatgactttgctaagttaatagagttaaaaatttttttaatataagccaaaatattaactttaatgaaacattgacttggcaaatgaatttcctataaattatcattggtcagaatgctgttttgtttaataatattacgcaacataaaccataggtgttattagaagtggagaactgcctttttcatctggggcttttaaggacttgctataaatgattattttttaaatgctttataaatcttcatggtttttctatttctgatacactcagctatagttaataccagagtatcctaccaggagtaatatttggaatatttaaatctagtaaaagaagaaagttgtacttcctggctgggagtattaggagatgggagtagagattcacttttaagttcttgaaaatatatgcattctcctaaatattaacaaaaatgatttggggaaatgacatggcttgattgttctgtttaaatttgtactgtggcttatgttacacatgttcatgttcacctctcattcacctgttttatatggtttaaaattctctttaacaaaattcagaaaattcacctgaaacgtattttgacctaaaagaaacatatttttgtatcagtattgaattttggacagtgcccccatataaggaagttactgttttaaaataaagcaaactaactgttttaaaaaaaaaaaaaaaaaaaaaaaaaaaaaaaaaaaaaaaaccaaaaaaaaaaaaaaa

SEQ ID NO: 60 - protein, 333 aa, Homo sapiens
MLGWIKRLIRMVFQQVGVSMQSVLWSRKPYGSSRSIVRKIGTNLSLIQCPRVQFQINSHATEWSPSHPGEDAVASFADVGWVAKEEGECSARLRTEVRSRPPLQDDLLFFEKAPSRQISLPDLSQEEPQLKTPARANEEALQKICALENELAALRAQIAKIVTQQEQQNLTAGDLDSTTFGTIPPHPPPPPPPLPPPALGLHQSTSAVDLIKERREKRANAGKTLVKNNPKKPEMPNMLEILKEMNSVKLRSVKRSEQDVKPKPVDATDPAALIAEALKKKFAYRYRSDSQDEVEKGIPKSESEATSERVLFGPHMLKPTGKMKALIENVSDS

SEQ ID NO: 61 - DNA, 2567 bp, Homo sapiens
ctccggcgcagtgttgggactgtctgggtatcggaaagcaagcctacgttgctcactattacgtataatccttttcttttcaagatgcctgaggaagtgcaccatggagaggaggaggtggagacttttgcctttcaggcagaaattgcccaactcatgtccctcatcatcaataccttctattccaacaaggagattttccttcgggagttgatctctaatgcttctgatgccttggacaagattcgctatgagagcctgacagacccttcgaagttggacagtggtaaagagctgaaaattgacatcatccccaaccctcaggaacgtaccctgactttggtagacacaggcattggcatgaccaaagctgatctcataaataatttgggaaccattgccaagtctggtactaaagcattcatggaggctcttcaggctggtgcagacatctccatgattgggcagtttggtgttggcttttattctgcctacttggtggcagagaaagtggttgtgatcacaaagcacaacgatgatgaacagtatgcttgggagtcttctgctggaggttccttcactgtgcgtgctgaccatggtgagcccattggcaggggtaccaaagtgatcctccatcttaaagaagatcagacagagtacctagaagagaggcgggtcaaagaagtagtgaagaagcattctcagttcataggctatcccatcaccctttatttggagaaggaacgagagaaggaaattagtgatgatgaggcagaggaagagaaaggtgagaaagaagaggaagataaagatgatgaagaaaaacccaagatcgaagatgtgggttcagatgaggaggatgacagcggtaaggataagaagaagaaaactaagaagatcaaagagaaatacattgatcaggaagaactaaacaagaccaagcctatttggaccagaaaccctgatgacatcacccaagaggagtatggagaattctacaagagcctcactaatgactgggaagaccacttggcagtcaagcacttttctgtagaaggtcagttggaattcagggcattgctatttattcctcgtcgggctccctttgacctttttgagaacaagaagaaaaagaacaacatcaaactctatgtccgccgtgtgttcatcatggacagctgtgatgagttgataccagagtatctcaattttatccgtggtgtggttgactctgaggatctgcccctgaacatctcccgagaaatgctccagcagagcaaaatcttgaaagtcattcgcaaaaacattgttaagaagtgccttgagctcttctctgagctggcagaagacaaggagaattacaagaaattctatgaggcattctctaaaaatctcaagcttggaatccacgaagactccactaaccgccgccgcctgtctgagctgctgcgctatcatacctcccagtctggagatgagatgacatctctgtcagagtatgtttctcgcatgaaggagacacagaagtccatctattacatcactggtgagagcaaagagcaggtggccaactcagcttttgtggagcgagtgcggaaacggggcttcgaggtggtatatatgaccgagcccattgacgagtactgtgtgcagcagctcaaggaatttgatgggaagagcctggtctcagttaccaaggagggtctggagctgcctgaggatgaggaggagaagaagaagatggaagagagcaaggcaaagtttgagaacctctgcaagctcatgaaagaaatcttagataagaaggttgagaaggtgacaatctccaatagacttgtgtcttcaccttgctgcattgtgaccagcacctacggctggacagccaatatggagcggatcatgaaagcccaggcacttcgggacaactccaccatgggctatatgatggccaaaaagcacctggagatcaaccctgaccaccccattgtggagacgctgcggcagaaggctgaggccgacaagaatgataaggcagttaaggacctggtggtgctgctgtttgaaaccgccctgctatcttctggcttttcccttgaggatccccagacccactccaaccgcatctatcgcatgatcaagctaggtctaggtattgatgaagatgaagtggcagcagaggaacccaatgctgcagttcctgatgagatcccccctctcgagggcgatgaggatgcgtctcgcatggaagaagtcgattaggttaggagttcatagttggaaaacttgtgcccttgtatagtgtccccatgggctcccactgcagcctcgagtgcccctgtcccacctggctccccctgctggtgtctagtgtttttttccctctcctgtccttgtgttgaaggcagtaaactaagggtgtcaagccccattccctctctactcttgacagcaggattggatgttgtgtattgtggtttattttattttcttcattttgttctgaaattaaagtatgcaaaataaagaatatgccgttttaaaaaaaaaaaaaaaaaaaaaaaaaaaaa

SEQ ID NO: 62 - protein, 724 aa, Homo sapiens
MPEEVHHGEEEVETFAFQAEIAQLMSLIINTFYSNKEIFLRELISNASDALDKIRYESLTDPSKLDSGKELKIDIIPNPQERTLTLVDTGIGMTKADLINNLGTIAKSGTKAFMEALQAGADISMIGQFGVGFYSAYLVAEKVVVITKHNDDEQYAWESSAGGSFTVRADHGEPIGRGTKVILHLKEDQTEYLEERRVKEVVKKHSQFIGYPITLYLEKEREKEISDDEAEEEKGEKEEEDKDDEEKPKIEDVGSDEEDDSGKDKKKKTKKIKEKYIDQEELNKTKPIWTRNPDDITQEEYGEFYKSLTNDWEDHLAVKHFSVEGQLEFRALLFIPRRAPFDLFENKKKKNNIKLYVRRVFIMDSCDELIPEYLNFIRGVVDSEDLPLNISREMLQQSKILKVIRKNIVKKCLELFSELAEDKENYKKFYEAFSKNLKLGIHEDSTNRRRLSELLRYHTSQSGDEMTSLSEYVSRMKETQKSIYYITGESKEQVANSAFVERVRKRGFEVVYMTEPIDEYCVQQLKEFDGKSLVSVTKEGLELPEDEEEKKKMEESKAKFENLCKLMKEILDKKVEKVTISNRLVSSPCCIVTSTYGWTANMERIMKAQALRDNSTMGYMMAKKHLEINPDHPIVETLRQKAEADKNDKAVKDLVVLLFETALLSSGFSLEDPQTHSNRIYRMIKLGLGIDEDEVAAEEPNAAVPDEIPPLEGDEDASRMEEVD

SEQ ID NO: 63 - DNA, 2242 bp, Homo sapiens
gaatctcgacccttgaatggagttacacgaacggccagatgaaagaaggaaggcccggacctccactcagggccgactaggggactggcggagggtgcacgctgatggatttactcaccgggtgcttggagctccagcagctggctggagcccgcgatgacgtcacggactcgggtcacatggccaagtccgccccgccccctccccgtccccgccgctgcagcggtcgccttcggagcgaagggtaccgacccggcagaagctcggagctctcggggtatcgaggaggcaggcccgcgggcgcacgggcgagcgggccgggagccggagcggcggaggagccggcagcagcggcgcggcgggctccaggcgaggcggtcgacgctcctgaaaacttgcgcgcgcgctcgcgccactgcgcccggagcgatgaagatggtcgcgccctggacgcggttctactccaacagctgctgcttgtgctgccatgtccgcaccggcaccatcctgctcggcgtctggtatctgatcatcaatgctgtggtactgttgattttattgagtgccctggctgatccggatcagtataacttttcaagttctgaactgggaggtgactttgagttcatggatgatgccaacatgtgcattgccattgcgatttctcttctcatgatcctgatatgtgctatggctacttacggagcgtacaagcaacgcgcagcctggatcatcccattcttctgttaccagatctttgactttgccctgaacatgttggttgcaatcactgtgcttatttatccaaactccattcaggaatacatacggcaactgcctcctaattttccctacagagatgatgtcatgtcagtgaatcctacctgtttggtccttattattcttctgtttattagcattatcttgacttttaagggttacttgattagctgtgtttggaactgctaccgatacatcaatggtaggaactcctctgatgtcctggtttatgttaccagcaatgacactacggtgctgctacccccgtatgatgatgccactgtgaatggtgctgccaaggagccaccgccaccttacgtgtctgcctaagccttcaagtgggcggagctgagggcagcagcttgactttgcagacatctgagcaatagttctgttatttcacttttgccatgagcctctctgagcttgtttgttgctgaaatgctactttttaaaatttagatgttagattgaaaactgtagttttcaacatatgctttgctggaacactgtgatagattaactgtagaattcttcctgtacgattggggatataatgggcttcactaaccttccctaggcattgaaacttcccccaaatctgatggacctagaagtctgcttttgtacctgctgggccccaaagttgggcatttttctctctgttccctctcttttgaaaatgtaaaataaaaccaaaaatagacaactttttcttcagccattccagcatagagaacaaaaccttatggaaacaggaatgtcaattgtgtaatcattgttctaattaggtaaatagaagtccttatgtatgtgttacaagaatttcccccacaacatcctttatgactgaagttcaatgacagtttgtgtttggtggtaaaggattttctccatggcctgaattaagaccattagaaagcaccaggccgtgggagcagtgaccatctgctgactgttcttgtggatcttgtgtccagggacatggggtgacatgcctcgtatgtgttagagggtggaatggatgtgtttggcgctgcatgggatctggtgcccctcttctcctggattcacatccccacccagggcccgcttttactaagtgttctgccctagattggttcaaggaggtcatccaactgactttatcaagtggaattgggatatatttgatatacttctgcctaacaacatggaaaagggttttcttttccctgcaagctacatcctactgctttgaacttccaagtatgtctagtcaccttttaaaatgtaaacattttcagaaaaatgaggattgccttccttgtatgcgctttttaccttgactacctgaattgcaagggatttttatatattcatatgttacaaagtcagcaactctcctgttggttcattattgaatgtgctgtaaattaagttgtttgcaattaaaacaaggtttgcccacatccaagaaaaa

SEQ ID NO: 64 - protein, 317 aa, Homo sapiens
MTSRTRVTWPSPPRPLPVPAAAAVAFGAKGTDPAEARSSRGIEEAGPRAHGRAGREPERRRSRQQRRGGLQARRSTLLKTCARARATAPGAMKMVAPWTRFYSNSCCLCCHVRTGTILLGVWYLIINAVVLLILLSALADPDQYNFSSSELGGDFEFMDDANMCIAIAISLLMILICAMATYGAYKQRAAWIIPFFCYQIFDFALNMLVAITVLIYPNSIQEYIRQLPPNFPYRDDVMSVNPTCLVLIILLFISIILTFKGYLISCVWNCYRYINGRNSSDVLVYVTSNDTTVLLPPYDDATVNGAAKEPPPPYVSA

SEQ ID NO: 65 - DNA, 2847 bp, Homo sapiens
ggtaccaacccctgccgcaggactttcctgggccggctcgcggagagcgtagcgcggccttggtggcggaatggcgttgagtgacggcccggccccgccatctggttaaagggactcgttcaacacggaagtgtcccggggctgcattgtgctacagctagaatgaagcacatcaacctatcatttgcagcgtgtggatttctgggcatttaccacttgggggcagcatctgcactttgcagacatggcaaaaaacttgtgaaggatgtcaaagccttcgctggggcgtctgcgggatcgttggttgcttctgttctgctaacagcaccagaaaaaatagaggaatgtaaccaatttacctacaagtttgccgaagaaatcagaaggcagtctttcggggcagtaacgcccggttatgacttcatggcccgactaagaagtgggatggagtcgattcttcctcccagcgctcacgagctggcccagaaccgactgcacgtatccatcaccaacgccaaaaccagagaaaatcacttagtctccactttttcctccagggaggacctcattaaggtcctcctagccagcagttttgtgcccatttatgcaggactgaagctagtggaatacaaagggcagaagtgggtggacggaggcctcaccaacgctcttcccatcctgcccgtcggccggacagtaaccatctcccccttcagtggacgactggacatctccccgcaggacaaagggcagctagatctgtatgttaatatcgccaagcaggatatcatgttgtccctggcaaacctggtgagactcaaccaagccctttttcccccaagcaagaggaaaatggaatctttgtatcagtgtggttttgatgacactgttaagtttttacttaaagaaaattggtttgaataaaatgcataaaagtttataatgcaaaacacgttttagatagtttttgatggaagtttctaatcaaatcctttttagaaaatctatcatgactcaattgtattactccttgtaatatttgtgtttatttttaatatttgaattattacttagcacatggatataagaggcactttattagaatttgacaacgtcattaagaaggatacacttaggtgataaggaatcatttttggtgaactgttgtgtcctttaaaaaatggaggaggataggttctttgggtaaattgaggaacatggaaaatggagggccaccacttaggttccatggagaatatgtggcatgatcttgacgtgaagcatgggtgtttccgtgacttagctgtgtccctgtagctctggaactgaaggaactaggtaggagaggaaggatttgagaaataggcaactcatggttaaagacctttgatcaggactggaggaacaaaggtttgtgtattagtccattttcacactgctgagaaagacatacccaagactgggcaatttacaaaagaaaggtttaatgggctcacagttccacatgactgaggaggcctcacaattgtggtggaaggtgaaaggcatgtctcacatggcagcagacaagagaagaaaacttgtgcagggaaactcccctttataaaaccatcggatctcttgagactcgttcactatcatgagaatagcatgggaaagacctgcctccatgattcagttacctcccactgggtccctcccacaacgtgtggcaattgtgggagctacatacacttcaagatgagatttgggtggggacacagccaaaccataacagtttgctttccacaggtgtgtgcagttgctcccagtgcagttaggggcagatatccagaagcctaggagattttgaagaggcttatcccctctcatcttcctcccctaaaccccaccccagtttaggagattatcaagctggttgtcattcattctctctctctctctctctctctctctctctctctctctctctctctctctctcgccatacctctctgagtatttagctattgttctatatactggatacatctattatgggaacttaaatagataaaatactactaaacacaaagaaccaagtagcctagtaaataagaattaaatccagaataatcattcacttctcatttttaaatcacgttgtactgatcccaggttttttactttctgagtagttgtccatcactttgaggacttgtgtatgggcttgtaccaatttactgacactgtcttaaatcctaaatctgtttttatgaggttttgccaagcaagaactcttgattactaagaggcagttagagacaaaccaatttaattccatgtcttcaattgtcacgcatttcttcttttactctttgaaactattctttgagtcaattttatggttctcagaagccaaaatacacaacttttagcacataaacaccaacgatggcctctttttgaggagttatgcatagacccactctagagtaatgatggtccctgtggtatatactttctcctactctagcaaacatgtagtttaatcttaatgtgttgtttccataagtgacatgaagtggatagattctcaattgttatgtccacttattcactaggtaaattttcagttttaatacttttctccttaccccttcctttgatcatttcatgtgaatattctatttgtatgatacactgtatttcaataaattccttgttgatgtacccttaaattgaagaaatttaagctgcaaaaccaaatctcattgtataagacttttttgaagtatcttgtatcgactacatatgtatttgaccctgtgggaggatggtacttttctttttaacttttattttaag

SEQ ID NO: 66 - protein, 253 aa, Homo sapiens
MKHINLSFAACGFLGIYHLGAASALCRHGKKLVKDVKAFAGASAGSLVASVLLTAPEKIEECNQFTYKFAEEIRRQSFGAVTPGYDFMARLRSGMESILPPSAHELAQNRLHVSITNAKTRENHLVSTFSSREDLIKVLLASSFVPIYAGLKLVEYKGQKWVDGGLTNALPILPVGRTVTISPFSGRLDISPQDKGQLDLYVNIAKQDIMLSLANLVRLNQALFPPSKRKMESLYQCGFDDTVKFLLKENWFE

SEQ ID NO: 67 - DNA, 2415 bp, Homo sapiens
cccgcggctgccgccgccatttcgggcgctgctgtgaagctgaaaccggagccggtccgctgggcggcgggcgccgggggccggaggggcgcgcgcggcggcggcaccccagcgtttaggcgcggaggcagccatggcgggcaacttcgactcggaggagcggagtagctggtactgggggaggttgagtcggcaggaggcggtggcgctgctgcagggccagcggcacggggtgttcctggtgcgggactcgagcaccagccccggggactatgtgctcagcgtctcagagaactcgcgcgtctcccactacatcatcaacagcagcggcccgcgcccgccggtgccaccgtcgcccgcccagcctccgcccggggtgagcccctccagactccgaataggagatcaagagtttgattcattgcctgctttactggaattctacaaaatacactatttggacactacaacgttgatagaaccagtttccagatccaggcagggtagtggagtgattctcaggcaggaggaggcggagtatgtgcgagccctctttgactttaatgggaatgatgaggaagatcttccctttaagaaaggagacatcttgagaatccgggacaagcctgaagagcagtggtggaatgcggaggacagcgaaggcaagagagggatgattccagtcccttacgtcgagaagtatagacctgcctccgcctcagtatcggctctgattggaggtaaccaggagggttcccacccacagccactgggtgggccggagcctgggccctatgcccaacccagcgtcaacactccgctccctaacctccagaatgggcccatatatgccagggttatccagaagcgagtccccaatgcctacgacaagacagccttggctttggaggtcggtgagctggtaaaggttacgaagattaatgtgagtggtcagtgggaaggggagtgtaatggcaaacgaggtcacttcccattcacacatgtccgtctgctggatcaacagaatcccgatgaggacttcagctgagtatagttcaacagttttgctgacagatgggaacaatcttttttttttttttccaactgccatctatacaattttcttacagatgtcaaaagcagtctagtttatataagcattctgttacctgtgatattttttagactgaactgctccattcctagtcttaattaccatattcagggtacgaactggagggcttgtgtgttagcttctgaattggcaattggaggcggtagtggtcgtgcctgtgtgtatcagaagggataggtatcttgcctcctttctctcaggcagtgcaaatcaccctgtggaaaaccgatggacaggaaggagtgttacacactgcttaccctgatttattcagtggttttgttttcattctggaaccatactatcaaatggcgacagactgttccgttccacccccgtgaagtaatcatgcaccgtgtgaatagtatcaagcaggattgctttcattgtatggagcatgaccagcgtgtgactcattctgacatttcagatcctaagaattctaagaacactactagaagcatttgttccctcctagtcaatgcttcatactttttcttgggattcttttagcccttgacattcttgtcccccaaacctgtaagtaggtgaattcctaagataagtgtgtattttcattccaggtgaaaagcaggatgtaccgagcactttattcagtgcatagctttaagccagtgttggattcactaagtggacagccagtctcccagctctctgccttccccaaaagggtcgtagtaggtcacccttctacagcagctaactagagtcctaactaatgggatccagcagggccatttctccagagggccagtatcctattaggagactcttggaattcttaggttctactcaagagtggaaggaccaatcacctctgatattctgtggaaggttttggggtcaaattctgccctctgcattctgtgcaacttgtataaaagtcaagttagtattacatgaatttggggtagggttagtgctttgaaaaaatgttgaaccggctgggcgcggtggctcacgtctgtaatcccagcactttgggaggccgaggcgggtggatcatgaggtcaggagttcgagaccagcctggccaacatagtgaaaccccatctctgctaaagatataaaaaattagcccggcgtggtggtgcacgcctgtaatcccagctactcgggaggctgaggcaggagaattgcttcaacctgggaggtggaggctgcagtgagccgagatcgcaccactgcgttccagcctgagcgacagggcaagactcagtctcaaaaaaaaaaaaaaggaaaaaaaaaagaaaaaaaaa

SEQ ID NO: 68 - protein, 304 aa, Homo sapiens
MAGNFDSEERSSWYWGRLSRQEAVALLQGQRHGVFLVRDSSTSPGDYVLSVSENSRVSHYIINSSGPRPPVPPSPAQPPPGVSPSRLRIGDQEFDSLPALLEFYKIHYLDTTTLIEPVSRSRQGSGVILRQEEAEYVRALFDFNGNDEEDLPFKKGDILRIRDKPEEQWWNAEDSEGKRGMIPVPYVEKYRPASASVSALIGGNQEGSHPQPLGGPEPGPYAQPSVNTPLPNLQNGPIYARVIQKRVPNAYDKTALALEVGELVKVTKINVSGQWEGECNGKRGHFPFTHVRLLDQQNPDEDFS

SEQ ID NO: 69 - DNA, 2979 bp, Homo sapiens
ccggggacggctgctggagcggcgcccgccgcggctcagcgcattcccgctctccgcttccctctccgctgcgtccccgcgcgaagatggcaaccgaggggctgcacgagaacgagacgctggcgtcgctgaagagcgaggccgagagcctcaagggcaagctggaggaggagcgagccaagctgcacgatgtggagctgcaccaggtggcggagcgggtggaggccctggggcagtttgtcatgaagaccagaaggaccctcaaaggccacgggaacaaagtcctgtgcatggactggtgcaaagataagaggaggatcgtgagctcgtcacaggatgggaaggtgatcgtgtgggattccttcaccacaaacaaggagcacgcggtcaccatgccctgcacgtgggtgatggcatgtgcttatgccccatcgggatgtgccattgcttgtggtggtttggataataagtgttctgtgtaccccttgacgtttgacaaaaatgaaaacatggctgccaaaaagaagtctgttgctatgcacaccaactacctgtcggcctgcagcttcaccaactctgacatgcagatcctgacagcgagcggcgatggcacatgtgccctgtgggacgtggagagcgggcagctgctgcagagcttccacggacatggggctgacgtcctctgcttggacctggccccctcagaaactggaaacaccttcgtgtctgggggatgtgacaagaaagccatggtgtgggacatgcgctccggccagtgcgtgcaggcctttgaaacacatgaatctgacatcaacagtgtccggtactaccccagtggagatgcctttgcttcagggtcagatgacgctacgtgtcgcctctatgacctgcgggcagatagggaggttgccatctattccaaagaaagcatcatatttggagcatccagcgtggacttctccctcagtggtcgcctgctgtttgctggatacaatgattacactatcaacgtctgggatgttctcaaagggtcccgggtctccatcctgtttggacatgaaaaccgcgttagcactctacgagtttcccccgatgggactgctttctgctctggatcatgggatcataccctcagagtctgggcctaatcatcttctgacagtgcactcatgtatacctgagaatttgaaatcttcacatgtaaatagatattacttctagaggagcttagagtttattgcagtgtagcttaggggagcaacccatggctcacaggtcactaagcgtctccaatatgactattaaaactgtcacctctggaaatacactagtgtgagccttcagcactgcgagaataccttcaagtacagtatttttcttttggaacactttttaaaatgtatctgtttttaaggttattctaaattatagtagcctcaactcattctgtcaccagtagaattcagcagttaatatattccatattatttctttgaatcaattcattttcagagcactttaaagtctgatatttctcgatgtgcactgtgatgcctggaaccttcctctggaagtgctgattttatggactgaggactggtgactggtctgtgatagaagcaaattccaattccaaatgtaattagacaaaaatcatttttttagaatgtgtttttattgtaaaagtatctttttcagcttcctgttctattgtcttttttcagatacaacatttttgtctatggtgaactgctgtaaatgacgcagagaaatgcctaaaaaggacaggtggtttgactcatggatgatgatgatgtcactgtgccacttggacagggcgttttctctgaattgaagggaaagccaatggtgtttgtaaacaaatgcttctgagagcaaagaaaagtcttctgtgtgggaacacaagatagtaaacttatttaaaaacctattagtagaattagtggaaacacttaggttaaagtgaatcttgtccatataaattatattcatggccgggcgcggtggctcacgcttgtaatcccagcactttgggaggccgaggcgggcggatcacgaggtcaggagttcgagaccacggtgaaaccctgtctctactaaaaaatacaaaaaattagccgggcgtggtggcgggcgcctgtagtcccagctactcggagaggctgaggcaggagaatggcgtgaacccgggaggtggagcttgcagtgagccgaggtcgagccactgcagcctgggtgacaaagcgagactccgtctcaaaaaaaaaaaaaaattatattcatatgtattgcattgcaattataattacatatgcagattgattgatagtcatgaataataacgtctgctcctcttacatagaaaaacgatattaaaagaagatcttctctttatttgagactcagaattccttctagaagaaggaagtgctttttgttataggatcccttcttttcctttttttgtttttttgtaagatgtagatgcttattctttgctttagaaaacttctcacttaaaaagatggcatgcacctaggggaataaaaggtcacctcagacaccaggtgtcattcctggtgaggcctgcctcgtcggtggcctggggtctgccggcaggttctggctgcacctgaaggctgcgtgcaccttgtcccctggacaggtctcctttcctggccctgctccagcccagcccttcttctagtggtagctctggctttgcaggcccagctccaggccctgctcctcagagagactcttccagagctggagctgggcacagccataagacaggactggaccagatgctcctgtaaacatccaggggtgtgccaggcccaccctcacaactgcttgttcaggtatcgtgatgggccactcggtccaaaatcagccaggccatcttttccatcatctcacttcaaataaacataataattatatttgatcatttgc

SEQ ID NO: 70 - protein, 353 aa, Homo sapiens
MATEGLHENETLASLKSEAESLKGKLEEERAKLHDVELHQVAERVEALGQFVMKTRRTLKGHGNKVLCMDWCKDKRRIVSSSQDGKVIVWDSFTTNKEHAVTMPCTWVMACAYAPSGCAIACGGLDNKCSVYPLTFDKNENMAAKKKSVAMHTNYLSACSFTNSDMQILTASGDGTCALWDVESGQLLQSFHGHGADVLCLDLAPSETGNTFVSGGCDKKAMVWDMRSGQCVQAFETHESDINSVRYYPSGDAFASGSDDATCRLYDLRADREVAIYSKESIIFGASSVDFSLSGRLLFAGYNDYTINVWDVLKGSRVSILFGHENRVSTLRVSPDGTAFCSGSWDHTLRVWA

SEQ ID NO: 71 - DNA, 4435 bp, Homo sapiens
ggcgaggcgcctgttgattggccactggggcccgggttcctccggcggagcgcgcctccccccagatttcccgccagcaggagccgcgcggtagatgcggtgcttttaggagctccgtccgacagaacggttgggccttgccggctgtcggtatgtcgcgacagagcaccctgtacagcttcttccccaagtctccggcgctgagtgatgccaacaaggcctcggccagggcctcacgcgaaggcggccgtgccgccgctgcccccggggcctctccttccccaggcggggatgcggcctggagcgaggctgggcctgggcccaggcccttggcgcgctccgcgtcaccgcccaaggcgaagaacctcaacggagggctgcggagatcggtagcgcctgctgcccccaccagttgtgacttctcaccaggagatttggtttgggccaagatggagggttacccctggtggccttgtctggtttacaaccacccctttgatggaacattcatccgcgagaaagggaaatcagtccgtgttcatgtacagttttttgatgacagcccaacaaggggctgggttagcaaaaggcttttaaagccatatacaggttcaaaatcaaaggaagcccagaagggaggtcatttttacagtgcaaagcctgaaatactgagagcaatgcaacgtgcagatgaagccttaaataaagacaagattaagaggcttgaattggcagtttgtgatgagccctcagagccagaagaggaagaagagatggaggtaggcacaacttacgtaacagataagagtgaagaagataatgaaattgagagtgaagaggaagtacagcctaagacacaaggatctaggcgaagtagccgccaaataaaaaaacgaagggtcatatcagattctgagagtgacattggtggctctgatgtggaatttaagccagacactaaggaggaaggaagcagtgatgaaataagcagtggagtgggggatagtgagagtgaaggcctgaacagccctgtcaaagttgctcgaaagcggaagagaatggtgactggaaatggctctcttaaaaggaaaagctctaggaaggaaacgccctcagccaccaaacaagcaactagcatttcatcagaaaccaagaatactttgagagctttctctgcccctcaaaattctgaatcccaagcccacgttagtggaggtggtgatgacagtagtcgccctactgtttggtatcatgaaactttagaatggcttaaggaggaaaagagaagagatgagcacaggaggaggcctgatcaccccgattttgatgcatctacactctatgtgcctgaggatttcctcaattcttgtactcctgggatgaggaagtggtggcagattaagtctcagaactttgatcttgtcatctgttacaaggtggggaaattttatgagctgtaccacatggatgctcttattggagtcagtgaactggggctggtattcatgaaaggcaactgggcccattctggctttcctgaaattgcatttggccgttattcagattccctggtgcagaagggctataaagtagcacgagtggaacagactgagactccagaaatgatggaggcacgatgtagaaagatggcacatatatccaagtatgatagagtggtgaggagggagatctgtaggatcattaccaagggtacacagacttacagtgtgctggaaggtgatccctctgagaactacagtaagtatcttcttagcctcaaagaaaaagaggaagattcttctggccatactcgtgcatatggtgtgtgctttgttgatacttcactgggaaagtttttcataggtcagttttcagatgatcgccattgttcgagatttaggactctagtggcacactatcccccagtacaagttttatttgaaaaaggaaatctctcaaaggaaactaaaacaattctaaagagttcattgtcctgttctcttcaggaaggtctgatacccggctcccagttttgggatgcatccaaaactttgagaactctccttgaggaagaatattttagggaaaagctaagtgatggcattggggtgatgttaccccaggtgcttaaaggtatgacttcagagtctgattccattgggttgacaccaggagagaaaagtgaattggccctctctgctctaggtggttgtgtcttctacctcaaaaaatgccttattgatcaggagcttttatcaatggctaattttgaagaatatattcccttggattctgacacagtcagcactacaagatctggtgctatcttcaccaaagcctatcaacgaatggtgctagatgcagtgacattaaacaacttggagatttttctgaatggaacaaatggttctactgaaggaaccctactagagagggttgatacttgccatactccttttggtaagcggctcctaaagcaatggctttgtgccccactctgtaaccattatgctattaatgatcgtctagatgccatagaagacctcatggttgtgcctgacaaaatctccgaagttgtagagcttctaaagaagcttccagatcttgagaggctactcagtaaaattcataatgttgggtctcccctgaagagtcagaaccacccagacagcagggctataatgtatgaagaaactacatacagcaagaagaagattattgattttctttctgctctggaaggattcaaagtaatgtgtaaaattatagggatcatggaagaagttgctgatggttttaagtctaaaatccttaagcaggtcatctctctgcagacaaaaaatcctgaaggtcgttttcctgatttgactgtagaattgaaccgatgggatacagcctttgaccatgaaaaggctcgaaagactggacttattactcccaaagcaggctttgactctgattatgaccaagctcttgctgacataagagaaaatgaacagagcctcctggaatacctagagaaacagcgcaacagaattggctgtaggaccatagtctattgggggattggtaggaaccgttaccagctggaaattcctgagaatttcaccactcgcaatttgccagaagaatacgagttgaaatctaccaagaagggctgtaaacgatactggaccaaaactattgaaaagaagttggctaatctcataaatgctgaagaacggagggatgtatcattgaaggactgcatgcggcgactgttctataactttgataaaaattacaaggactggcagtctgctgtagagtgtatcgcagtgttggatgttttactgtgcctggctaactatagtcgagggggtgatggtcctatgtgtcgcccagtaattctgttgccggaagataccccccccttcttagagcttaaaggatcacgccatccttgcattacgaagactttttttggagatgattttattcctaatgacattctaataggctgtgaggaagaggagcaggaaaatggcaaagcctattgtgtgcttgttactggaccaaatatggggggcaagtctacgcttatgagacaggctggcttattagctgtaatggcccagatgggttgttacgtccctgctgaagtgtgcaggctcacaccaattgatagagtgtttactagacttggtgcctcagacagaataatgtcaggtgaaagtacattttttgttgaattaagtgaaactgccagcatactcatgcatgcaacagcacattctctggtgcttgtggatgaattaggaagaggtactgcaacatttgatgggacggcaatagcaaatgcagttgttaaagaacttgctgagactataaaatgtcgtacattattttcaactcactaccattcattagtagaagattattctcaaaatgttgctgtgcgcctaggacatatggcatgcatggtagaaaatgaatgtgaagaccccagccaggagactattacgttcctctataaattcattaagggagcttgtcctaaaagctatggctttaatgcagcaaggcttgctaatctcccagaggaagttattcaaaagggacatagaaaagcaagagaatttgagaagatgaatcagtcactacgattatttcgggaagtttgcctggctagtgaaaggtcaactgtagatgctgaagctgtccataaattgctgactttgattaaggaattatagactgactacattggaagctttgagttgacttctgacaaaggtggtaaattcagacaacattatgatctaataaactttattttttaaaaatgaaaaaaaaaaaaaaaaaaaaaaaaaaaaaaaaaaaaaaaaaaaaaaaaaaaaaaaaaaaaaaaaaaaaaaaaaaaaaaaaaaaaaaaaaaaaaaaaaaaaaaaaaaaa

SEQ ID NO: 72 - protein, 1360 aa, Homo sapiens
MSRQSTLYSFFPKSPALSDANKASARASREGGRAAAAPGASPSPGGDAAWSEAGPGPRPLARSASPPKAKNLNGGLRRSVAPAAPTSCDFSPGDLVWAKMEGYPWWPCLVYNHPFDGTFIREKGKSVRVHVQFFDDSPTRGWVSKRLLKPYTGSKSKEAQKGGHFYSAKPEILRAMQRADEALNKDKIKRLELAVCDEPSEPEEEEEMEVGTTYVTDKSEEDNEIESEEEVQPKTQGSRRSSRQIKKRRVISDSESDIGGSDVEFKPDTKEEGSSDEISSGVGDSESEGLNSPVKVARKRKRMVTGNGSLKRKSSRKETPSATKQATSISSETKNTLRAFSAPQNSESQAHVSGGGDDSSRPTVWYHETLEWLKEEKRRDEHRRRPDHPDFDASTLYVPEDFLNSCTPGMRKWWQIKSQNFDLVICYKVGKFYELYHMDALIGVSELGLVFMKGNWAHSGFPEIAFGRYSDSLVQKGYKVARVEQTETPEMMEARCRKMAHISKYDRVVRREICRIITKGTQTYSVLEGDPSENYSKYLLSLKEKEEDSSGHTRAYGVCFVDTSLGKFFIGQFSDDRHCSRFRTLVAHYPPVQVLFEKGNLSKETKTILKSSLSCSLQEGLIPGSQFWDASKTLRTLLEEEYFREKLSDGIGVMLPQVLKGMTSESDSIGLTPGEKSELALSALGGCVFYLKKCLIDQELLSMANFEEYIPLDSDTVSTTRSGAIFTKAYQRMVLDAVTLNNLEIFLNGTNGSTEGTLLERVDTCHTPFGKRLLKQWLCAPLCNHYAINDRLDAIEDLMVVPDKISEVVELLKKLPDLERLLSKIHNVGSPLKSQNHPDSRAIMYEETTYSKKKIIDFLSALEGFKVMCKIIGIMEEVADGFKSKILKQVISLQTKNPEGRFPDLTVELNRWDTAFDHEKARKTGLITPKAGFDSDYDQALADIRENEQSLLEYLEKQRNRIGCRTIVYWGIGRNRYQLEIPENFTTRNLPEEYELKSTKKGCKRYWTKTIEKKLANLINAEERRDVSLKDCMRRLFYNFDKNYKDWQSAVECIAVLDVLLCLANYSRGGDGPMCRPVILLPEDTPPFLELKGSRHPCITKTFFGDDFIPNDILIGCEEEEQENGKAYCVLVTGPNMGGKSTLMRQAGLLAVMAQMGCYVPAEVCRLTPIDRVFTRLGASDRIMSGESTFFVELSETASILMHATAHSLVLVDELGRGTATFDGTAIANAVVKELAETIKCRTLFSTHYHSLVEDYSQNVAVRLGHMACMVENECEDPSQETITFLYKFIKGACPKSYGFNAARLANLPEEVIQKGHRKAREFEKMNQSLRLFREVCLASERSTVDAEAVHKLLTLIKEL

SEQ ID NO: 73 - DNA, 9805 bp, Homo sapiens
aaatgctactttgattgattctccgccccctccattcttctcttcctgcaattgctctatcacttcttccctctcaagtcccgccctttcagctacctccaactgctgaggaaccggttgcctaaaaggagccggcaaaagcgcctacgtggagtccagaggagcggaagtagtcagatttgactgagagccgtaaagcgcggctggctctcgttttccggataacgactacagctccgactgtcagtgccggccttcctcgtgtgaggggatctgccggacccctgcaaattcaatttctttcccattccgggcccttccctatcgtcgcccccttcaccttggatcatgttcaagaaatttgatgaaaaagaaaatgtgtccaactgcatccagttgaaaacttcagttattaagggtattaagaatcaattgatagagcaatttccaggtattgaaccatggcttaatcaaatcatgcctaagaaagatcctgtcaaaatagtccgatgccatgaacatatagaaatccttacagtaaatggagaattactcttttttagacaaagagaagggcctttttatccaaccctaagattacttcacaaatatccttttatcctgccacaccagcaggttgataaaggagccatcaaatttgtactcagtggagcaaatatcatgtgtccaggcttaacttctcctggagctaagctttaccctgctgcagtagataccattgttgctatcatggcagaaggaaaacagcatgctctatgtgttggagtcatgaagatgtctgcagaagacattgagaaagtcaacaaaggaattggcattgaaaatatccattatttaaatgatgggctgtggcatatgaagacatataaatgagcctcagaaggaatgcacttgggctaaatatggatattgtgctgtatctgtgtttgtgtctgtgtgtgacagcatgaagataatgcctgtggttatgctgaataaattcaccagatgctaaaattctgttagcttcagaaattattttaagttttcttaaactcaagttaaaattgggtagcaaacttggacattaaaaggtatctggtaagtaagcaaactcatacaactaatgtcctttcttaggctaatgatataagagtgaagagcaggacttggtcaatggattgccattttatggtagacctctagagaaactgtctagttaaatggggctagaaactagactaggaattttattctattactccaggggacccagcagtgctcattctcgtgtgtgtgtgtgtgtgtgtgtgtgtatgtgtgtgtgtgtgtgtgtgtgtgttttgttgattgtttttttaaaaaaaacttcaatggaaaattctaaacatattaagaagtctggagaatagtataatggacctctccatatccatcacccagtttcagtttatggtcagtcttatttcatctatacctcaattatttctccccaccccccaattattttgaagcaaatcccagacatcctatcatttcatccataactactttattcttttttttttttttttgaaacagggtcttgctctgttgcccaggctggagtgcagtggtacgatcttggctcactgtaacctccacctcccgggttcaagcgattcttgtgcctcagcctcctgagtagctgggattacaggcacgtgccaccatgcccggctaattttgtatttttggtagagatggggtttcgctatgttggccagactggtcttgaactcttggcctcaagtgatccgtccccctctgcctcccaaagtgctgggattacaggcatgagccaccgtgcccagctaatttttatatattttatagttggccaggctggtcttgaactcctggcctcaagtgatcagcctcccaaagtgctgggattataggcatgagtcaccatgcctggcgtcataactactttagtgtgtatctttaaaaattagaaaaaccccacaataccattatcacacctaaaaagttgaactgtttcttaatatgatcaactgtctagactgttaattctctttaactgttggtttgcttgaaataggtaccacacaaggttcatacattgcatttggttgttatttattgaagtctgtttaatttataagttaccttttcttttcccccttaaattatttaagaaatctagttgttttgtctttaaagtttccacacatattctggattttgttgattgtatcactgtgaagtcattaacttgtttttatgcctcctgtatatcctgtaaacaaataagattgatcagattcaggttcagtttttttagtgccttcttttgagtaaagtcataccaaacagatgcccagaacatctggatttgggtccccactagactccttaaataatgtatatcttctataagtggaatatgagggacatggacctgctttagtaagaacagtaatctgtttggggagttaaaagagcagttgtggatttatttattgataaagaccatttttcttcctaataaccttgctgttattctagtgtcttagccatcttcatttggttgtttaccaatatatgacatgtgattttatttttcagatggatacagacatatacaagattgtggtgacctgtgttacagttagaagttggtgagaaaggtgagggtggatagcaaaaagagagagatcatttggctggctgttccagctgggtctcccaggatgtaacataggtggacatagatccagggtctgaccctcagcttgagaaaccatttcccactgatgaaacttgagagacttggagattccccagttagaatataaatgtattaattcatagtgataggtctgcctatggtaaacaattaggaaacaggaagttacttggtaaacacaggtatgagcaaaggaagattgataaattggggtaatatttcagttgtgctgaggtaagacttggagaatttttcctgcttcatcattaattagaatgcttatctctgccaaaatctcatctctttcctagcccatagaggtgccctgatattttatttcctatatccttttcaagttccatgtagttttccttatgttatgacagttttattctgcagcttaccatattatttattcctggtccacgaaagtataaatagtctcatcaggaactcatttgtaagtcatctcccaggggggtttcttcaacagatagtttaattttttgctgacttactggcttcaaattcagatgtctccctatttgggggaggaggcaccctatttgaggcctgtagctccttatgttcttaaaaagaatatacaagtcatttatgtcagaatcaaactttgaacctttatttttgttgctaagagaatgttttttgaccaagactgcctatggagtattagcaatgaaaaacaaagcacacatatacatacattagagaagtaaaaacttttaatagcttggtttttgaaataattcatctttgtgtctaaccactgttacagtgggtgtaaggaacactttttaaatattcaacatcaacatctgtgcttgtttttctactgtgctgaggtacactgtgttgccttggtgatatggactaaatatgtatgttctctgcttcccctgggtctgaggcctctgctcatcactgttaatcagggatgtcactctacatgtgtgatccttgtcattttctaaacattaggtcatacatgaaaggcaattcaaagagattaaactagcagatgtgtcagcatctttagatactgtgcttaatggaaacttagtttacctatattcgtgagaataggaatacagggatagagagcctgcttctctcaggcagtgtgtctttagttcatttttagtttcaaaattaagtttgtgtcaaaccaacctacaatctagtaacttgtgtattggactcacttttactcagacaaggtcagttcagctcaataggtatttattgagtatctactaggttctaagtgacgtggcatgaagatgaataatacagaagtagcccttgctcttaaggagcttccaatctagtgagtaaagaaaatttacattttaaataatctgggtaatggtgacagcccaatactaatatgtaaagccagtaggaatgtactaatccttttccaattttagtcatcaaaaattgtaaattacaaatgaactaaatgtagtaatattccatagattgtatccaatgtgagggtaaaaaaaaaatcccagatgtcttggagttgccgtgattcagcatcccaactcagatgattgtcctgttgtccggtgacataatggcctgatcagttctcttctagcagactgtctgttatggtggtttggtagtggtctgttgggaagctgcatttttccttttctgtttttatgctctggaccccaaacaaaaacagctggatttatcccatgggtagtcatgaacatttccaatttgagggattttatattccccaaacagaaggttatatggcatatatcaaataataatgatatccagccaggttccctgtcgtacccaaatcagtaactgaagatacgtatttctaagtataatacttcagaggaagagataagaattacaattcactaaattcgtggaggtgtttcattataataaatatgtcacttattaataatgtagcaattatatattaatggaaatatgaatgtatgcccaagcaaaatgtcataaatattttaactttgtttgtctaggttccttaattttgagactataattatcaaggctcttcaagaaactcaaaatgattctaatttctaagtagtatgcattaaaactgatatataatgaaagaaaaacagtgaaaatgtatgcatcagtttctaaagaaatcatacttgtcattgtagagatgcatgtaaattaaatgtattatacatttttatacttgtatgtattttatactttgtatgaatacttttattacactttttaaggcaggtaaaagaatgagtagatgttatcaactataacaacaatttgttgaatactgtgttaaaaccaagtaaaggaccacaactccacgagatcaggaatgaatgaagaaaattgagggccagtttttaaatcattgttgagactattaggttcatctgtctgtttaagagtctggccttagggaatataatttatgcatgtaaaaaaatacaggagatgattcactggaatgtctcttaataataccatgttcattaagaataggtcattgggaggaaaaataaataaaaacatctgaactcattagtataattaatacttgcctcttagaatgaaaattaaagaactccaaattttagccttgaatactttgagaaataaaagatgaattagtgaaataatttctacttaaaatcttagttgttacagagaatgacatgcctcactattaatgtccaattctaattaatggattgttttagaaatgtatttgtgaaatatagcaaacatagctagtaatactaacaggtgaaaactgatatttcaaatgactaaatagacttaagattagaggaaggtaggaaaaggtgtgcaactaacagaagcagttaaccaaaaaatgagcttcaggcatcagtcttatttggaagactgtaaatcaacaggctaacgttcaaaatatggcagacatcttaatatcaatatatgctaaattggtttatctttaggcagaaacagaaagcaaaaaattaaactcatccaactcatacatttgttgttgttgttgttgttgttgtttttgagatggagtcttgcttcattgcccaggctggagtgcaatggcacgatctcggctcactgcaacctctgtcttccgggttcaagcgattctcctgcctcagcctcccgagtagctgggatcccatgcgtgtgccaccacacctagctaatttttgtatttttagtagagacagggtttcaccatgttggccaggctggtctcaaactcctgacctcaggtgatgcacccgccttggcctcccaaagtgctgggattacaggtgtgaaccaccacacccgacccaactaatacatttttaaaatcccattttaaaagtaaaaccacagttttcatataacaaatgttattgctcttcatttcattctccaattttaaaatgctttactttcagccaatatgtgaatataggagacttcaaaagcataatcaattactcccttaaagttcattgtaagtgttctcagaactctaccacctagaatttaaagacgggaagatttactttataattttaatttcttatcacaagactcgattgtcaataactgttaacgtccatttaataatctatggtgaaataggtaatttcttcttattttcacaagcgtgtgagtaaaagactgggttttaagcaataaatcatttgttctaactaagcacatgcttggaaaaagtgctatttttccaaacgtatgccttgaaaacaaatacaattcaattgcctttttggttcatgggaagccatactgcggtggcttccaaggttggccaacctgtttttattcttaccacctctttcaaaaagggatgttgtctttgtccccaaattctggtgttgtcctatgctgatgcataatgaagccctgaggcttggaaacttgcaaaccaataagatgatttaatgatgaaacggcatgtcagtttgacactgtctattaatagtccttgagtgagcttaaatttgagacacttttaaaagcggcatgtagttccagttttgcttcccttatcagtggagcttgagatgtctgttcctgccgactgatgttttaacaaatttttagtttctcatgatgtgaaagattttgtatgcacgtcttagtctggatactgttttcattagttctaatgctgctgcatgcaaattttgtttaaaaccaaaattgactcttcacatctggactagattggacatggtgaggaggctggaaggaaagtcctttttgctctgtaggctctggacagctttcttagagttgacttatccaggattaagaaaaagttttcttttgcgtgactaaattctttccacagtttgcttgtgtaagcattttagatttaagcaagttcaacttgaaatatatttgaatatgaagtagaaacagcttcatttaatgggataatagcaatctctaacccatcaaattaatatctactaaatagcttccaaaaagcactgactggaaaatatttttcactatcatggctttattcagtttcaaaaacagtaggggctaaaatgtttggacatttatcctgcatttattttgtgtttcacaaggttaaaattttgtattttgtaaagtgtctgaaaaggagtccacaaagtatttctgctttcttgctcctgaatgcaaaggtctgagagaaggcacatcctcattagcttctgggtgttgtcaaacccaatcctctctcaagtaccaaatgcccagatacatttattgggatgcaggaatctcacttaagtagcggtttttgctgatataaagacaaacatcttgattaaagtgtagggagatagaaactataccaatttgggcaattttggctctaatgtctaatttgttgtgaaaggggaagatgttctaagctaatgttcttaaaagtaacttatgaatttcttaaaaatagtttttaaaaagctgtttcaggaaaagctgttttattgcatggcacagattaaatgtacagatgttatcttaaaacaatgaaagagttcccctaatttgaatattcaataccagctgttattcacatcaatattttaacattttaccatcaagatatttaatacaaaggattgatacatatttaactgtttagaattctagttaaacttgtccagatgagtaagagggaaggagaaataacattctccaagtacctaccatgtgcacaagctctacttatatatcttgcttaatcttagcaatgattccatgaggtagattttaactctcattttacaaacgaggagactaaggctcagagaggtcatacaacttcaggaaagttgtatgacctctctgaggtaataaatggcagaactggaatttgaacctaagtctccttgtctgcaaatcctgtgttttgcagaaaactctcctcttgtatttcataaaatgttaaatcttggcccaaattcaaatcaccatctttatgggttattggagagaggtataagttggcaagactctgttccacgatgggaaaaaatgggtaggatttgaatgagtaagagtgggatacttgcacagtatcatatttgtgtggctggagtaatgtttttctgtttccctcttagcaaagtggagtgggagaatcttgaaattgaactcagtcctgaggtctgattttcctattattagtcactttcaagccaggtgatttgtgaccatttaaatgttatgctatttcaaagtcttctacatctttagaaaaggacatgagggagggttagttaagtggggcaatgagaatgtagagtgtaatgtgcaaaagcaggactagcagttgctttgaagatatctggggaaggccgggcacggtggttcacgcctgtaatcccagtactttgggaggccaaggtgggcggatcacgaggtcaggagatcgagaccatcctggctaacgtgaaaccccgtctatactaaaaatacaaaaaattaaccggacgcagtggtgggcgcctgtagtcccagctactcgggaggctgaggcaggagagtggcatgaacccgggaggcggagcttgcagtgagctgagatcgcaccactgcattccagcctggacaacagagcgaaactccgtctcaaaaaccaaccaaacaaaaaacaaaaattagctgggcatggtggcgcgtgcctgtaatcccagcactttgggagccaaggtgggtggatcatgaggtcagaagattgagaccaccctggccaacatggtgaaatcctgtctctactaaaaatacaaaaaaaaaaaaaaaaaaaaaaattagccgggcgtggtggcgcgtgcctgtaatcccagctacacaggaggctgaggcaggagatttgcttgaacctgggaggcggaggttgcagtgagccgagattgtgccactgcactccagcctgggcgacagagcaagactccgtctaaaaaaaaaaaaaagatattaaaattaatgacaggaagagtttgggttcagttataatttaagggaaaaaacattgaggggcctaatctacattttgctccggatccaatgatttaatttttgggaagaaaaatccagtgattaaagtcatgcaaggagatggcctggggcttgctaaaagtcaggttgcagtttccattgcattcaagaaaatcagaaaaataaatacaacttttagaagaaactaagttttctcccattcatgtttagctattggggggtctcatacttctggacttgcttagacctatgctatctaatatggtagcctctgcccatccatatgtggccactgagaacttgaaatgtgactagtttgaattaagatgtgctgtaactaaaatacaccctggatttcaaagacttaataaataatgtaaattatctattctttcctgttgattatatattgaaatgataatattttggatatgtttgggttaaataaaatatattactaaaagtaaaaaaaaaaaaaaaaaa

SEQ ID NO: 74 - protein, 181 aa, Homo sapiens
MFKKFDEKENVSNCIQLKTSVIKGIKNQLIEQFPGIEPWLNQIMPKKDPVKIVRCHEHIEILTVNGELLFFRQREGPFYPTLRLLHKYPFILPHQQVDKGAIKFVLSGANIMCPGLTSPGAKLYPAAVDTIVAIMAEGKQHALCVGVMKMSAEDIEKVNKGIGIENIHYLNDGLWHMKTYK

SEQ ID NO: 75 - DNA, 1975 bp, Homo sapiens
agaaggctatttccgtttccgtacggaagcaaaggagccaagaccatggcgaaagccggggataagagcagcagcagcgggaagaaaagtctaaaacggaaagccgctgccgaagaacttcaggaggctgcaggcgctggggatggggcgacggaaaacggggtccaacccccgaaagcggctgcctttccgccaggctttagcatttcggagattaaaaacaaacagcggcgacacttaatgttcacgcggtggaaacagcagcagcggaaggaaaagttggcagctaagaaaaaacttaaaaaagaaagagaggctcttggcgataaggctccaccaaagcctgtacccaagaccattgacaaccagcgagtgtatgatgaaaccacagtagaccctaatgatgaagaggtcgcttatgatgaagctacagatgaatttgcttcttacttcaacaaacagacttctcccaagattctcatcacaacatcagatagacctcatgggagaacagtacgactctgtgaacagctctccacagttataccaaactcacatgtttattacagaagaggactggctctgaaaaaaattattccacagtgcatcgcaagagatttcacagacctgattgttattaatgaagatcgtaaaaccccaaatggacttattttgagtcacttgccaaatggcccaactgctcattttaaaatgagcagtgttcgtcttcgtaaagaaattaagagaagaggcaaggaccccacagaacacatacctgaaataattctgaataattttacaacacggctgggtcattcaattggacgtatgtttgcatctctctttcctcataatcctcaatttatcggaaggcaggttgccacattccacaatcaacgggattacatattcttcagatttcacagatacatattcaggagtgaaaagaaagtgggaattcaggaacttggaccacgttttaccttaaaattaaggtctcttcagaaaggaacctttgattctaaatatggagagtatgaatgggtccataagccccgggaaatggatacaagtagaagaaaattccatttataaagtactgagagaatgatattggattttgctgaacaggcctatcttgaactttggtaaattatttttgacagaatactcttttcaaaatggcatttgctgatttcataaacctttcacgtctggacgaattaccaaatgccatgaattgccactgtgtgtttatgtagaaaatacaaataaaagttattttgatggcttaggtttccttaaacttagttctcttgtttttgggtaactgtgaataattaagttggaatcaagattcagattaactttcctatttgcatagaacacatgagaggaataaaatggttggtaaatattggctaacccttgatttttataccagattaaccttggattcccagtgtctggcacagttttaatagcttaaatggaggccaggtttctggatgttttaacattctcttaagccttcagaagggtaaaaaatttaaagcaaaatgatctaccagggtttaaagcaaagttgcaaattactgaagctaatctttgcttcctgattttgaggtttttggttttttgtgcccacgttgtggggagctcttttttacctcattacatggtgctgtagtactccattcaggcactgaaacaaagttaaccctataagtaactcatggatggaaacccgtagaacttaacagcctcctcctgaccttaaaagaataaaggttcacagtttacctttaattccctagcagtcttgccagatgtatggcataaagtcatgtgagaagagtaggtggaaaaaactgtacaaacttaaccccttcaggtgttcagaacagattaatataccatgtatttaataccaataataatgcaaaataaaagtttcatactaagttttattgta

SEQ ID NO: 76 - protein, 349 aa, Homo sapiens
MAKAGDKSSSSGKKSLKRKAAAEELQEAAGAGDGATENGVQPPKAAAFPPGFSISEIKNKQRRHLMFTRWKQQQRKEKLAAKKKLKKEREALGDKAPPKPVPKTIDNQRVYDETTVDPNDEEVAYDEATDEFASYFNKQTSPKILITTSDRPHGRTVRLCEQLSTVIPNSHVYYRRGLALKKIIPQCIARDFTDLIVINEDRKTPNGLILSHLPNGPTAHFKMSSVRLRKEIKRRGKDPTEHIPEIILNNFTTRLGHSIGRMFASLFPHNPQFIGRQVATFHNQRDYIFFRFHRYIFRSEKKVGIQELGPRFTLKLRSLQKGTFDSKYGEYEWVHKPREMDTSRRKFHL

SEQ ID NO: 77 - DNA, 2295 bp, Homo sapiens
acacgccgcgctgaggcccgcgggcccgtcatggaggcgcccaccgtggagacgccccccgacccctcgcccccttcggccccggcccctgccctggttccgttgcgcgccccggatgtggcgcggctgcgcgaggagcaggaaaaggtggtcactaactgccaagagagaatccagcattggaagaaggtagataatgactataatgcccttcgagaaagactcagcaccttgcctgataaattgtcttataatataatggtaccatttggcccttttgccttcatgccaggaaaacttgtccatactaatgaagtcactgttttactgggggacaactggtttgcaaagtgctcagcaaagcaggctgtaggtttagttgagcaccggaaagaacatgtaagaaaaacaatagatgacttaaaaaaagtgatgaaaaattttgaatccagagttgaattcacagaagatttgcagaaaatgagcgatgctgcaggtgatattgttgacatacgagaagaaattaaatgtgacttcgaatttaaagcaaaacaccgaattgctcataaaccgcattccaaaccaaaaacttcagatatttttgaagcagatattgcaaatgatgtgaaatccaaggatttgctagctgataaagaactgtgggctcgacttgaagaactagagagacaggaagaattgctgggtgaacttgatagtaagcctgatactgtgattgcaaatggagaagatacgacatcttctgaagaggaaaaggaagatcgtaacacaaatgtgaatgcgatgcatcaagtaacagactctcatactccttgtcataaggatgttgcaagttcagaaccattcagtggtcaagtgaatagtcagttgaactgttcagtgaatggttccagttcttaccacagtgatgatgatgatgatgatgatgatgacgacgacgacgacaacattgacgacgatgatggtgataacgaccatgaggctttaggggttggagataattctataccaacaatatatttttcacatactgttgagcctaagagggtccgaataaatactggaaagaataccactttaaaattcagtgaaaagaaagaagaagccaaacgtaaacgaaagaacagcactggcagtggccactctgcccaggagctgccgaccatcaggacgcctgcagacatttacagagcctttgttgatgttgtgaatggagaatatgtccctcgcaaatccatcctgaagtctcgaagtagagagaatagtgtgtgtagcgacactagtgaaagcagtgctgctgaatttgatgataggcggggagttttgaggagtatcagctgcgaagaagccacttgcagtgacaccagtgagagcattttggaagaggaaccacaagaaaatcaaaagaaacttttgcccttatcagtaacacctgaggctttttctggaactgttatagaaaaagaatttgtatcaccttccttaacaccacccccagccattgctcatcccgcactacccactattccagaacgaaaggaagttctgttggaagcatctgaagaaactggaaagagggtttcaaagtttaaagctgccagattgcaacagaaagactaggccctgtctaggaaatgggaatttacatcctaaaacctagttgttcatttgtttagagtatctatagcaaaataggttacatgtagtttgaaataaggtatcctgagttactttggcaacaagttcttttacccttacccgtggtatttgaaaaaaatcaaggtaactgtctgaatactttaatatcagcttgttttgtgaattctctgaatactgtcaacactcttatctaagtttgcctttatgatgcagtggcagcattttgaattacttttcaaagaatactgttcatatgcattgtttttgtgtttcaaactaaatacaggcagttttgtgccagctgtgatattgtgcataccatatggaccattttaaagaaaattttaaaatttcaaatagattcaacaattacattacttgctttcacattttaaaggcactttaaaaaaatctacttctcttgtaggttttgcggctagttggctattcaagaaacctcgcccctctgaatgtcatactgtaatctttaaggaagaaagctacatgaattaattgtactctatgggaaaatttctttggaaagatattttgtaaaacttttttttccaagtaaaaactttatgaaacttggtctcaaaaaaaaaaaaaaaaaaaaaa

SEQ ID NO: 78 - protein, 535 aa, Homo sapiens
MEAPTVETPPDPSPPSAPAPALVPLRAPDVARLREEQEKVVTNCQERIQHWKKVDNDYNALRERLSTLPDKLSYNIMVPFGPFAFMPGKLVHTNEVTVLLGDNWFAKCSAKQAVGLVEHRKEHVRKTIDDLKKVMKNFESRVEFTEDLQKMSDAAGDIVDIREEIKCDFEFKAKHRIAHKPHSKPKTSDIFEADIANDVKSKDLLADKELWARLEELERQEELLGELDSKPDTVIANGEDTTSSEEEKEDRNTNVNAMHQVTDSHTPCHKDVASSEPFSGQVNSQLNCSVNGSSSYHSDDDDDDDDDDDDDNIDDDDGDNDHEALGVGDNSIPTIYFSHTVEPKRVRINTGKNTTLKFSEKKEEAKRKRKNSTGSGHSAQELPTIRTPADIYRAFVDVVNGEYVPRKSILKSRSRENSVCSDTSESSAAEFDDRRGVLRSISCEEATCSDTSESILEEEPQENQKKLLPLSVTPEAFSGTVIEKEFVSPSLTPPPAIAHPALPTIPERKEVLLEASEETGKRVSKFKAARLQQKD

SEQ ID NO: 79 - DNA, 3860 bp, Homo sapiens
cctgttcctcttaccctgcccggctccagctgaccagggaaggggtgggctgaactgaggcgggggcaagggagtgcccgacatcttgtccgactccgcgggtgacacgagccggttctctctggactggtggcagcgcgcggccccgaaccgcgccccaggccggcaggcggggaaggagccggtgggggtagggggtgcggtggggggtggggaccctccggctcttgggggtcccagtccccgccggctgctgagcgggtggggtggtggaggagctgcagagatgtccggccagagcctgacggaccgaatcactgccgcccagcacagtgtcaccggctctgccgtatccaagacagtatgcaaggccacgacccacgagatcatggggcccaagaaaaagcacctggactacttaattcagtgcacaaatgagatgaatgtgaacatcccacagttggcagacagtttatttgaaagaactactaatagtagttgggtggtggtcttcaaatctctcattacaactcatcatttgatggtgtatggaaatgagcgttttattcagtatttggcttcaagaaacacgttgtttaacttaagcaattttttggataaaagtggattgcaaggatatgacatgtctacatttattaggcggtatagtagatatttaaatgagaaagcagtttcatacagacaagttgcatttgatttcacaaaagtgaagagaggggctgatggagttatgagaacaatgaacacagaaaaactcctaaaaactgtaccaattattcagaatcagatggatgcacttcttgattttaatgttaatagcaatgaacttacaaatggggtaataaatgctgccttcatgctcctgttcaaagatgccattagactgtttgcagcatacaatgaaggaattattaatttgttggaaaaatattttgatatgaaaaagaaccaatgcaaagaaggtcttgacatctataagaagttcctaactaggatgacaagaatctcagagttcctcaaagttgcagagcaagttggaattgacagaggtgatataccagacctttcacaggcccctagcagtcttcttgatgctttggaacaacatttagcttccttggaaggaaagaaaatcaaagattctacagctgcaagcagggcaactacactttccaatgcagtgtcttccctggcaagcactggtctatctctgaccaaagtggatgaaagggaaaagcaggcagcattagaggaagaacaggcacgtttgaaagctttaaaggaacagcgcctaaaagaacttgcaaagaaacctcatacctctttaacaactgcagcctctcctgtatccacctcagcaggagggataatgactgcaccagccattgacatattttctacccctagttcttctaacagcacatcaaagctgcccaatgatctgcttgatttgcagcagccaacttttcacccatctgtacatcctatgtcaactgcttctcaggtagcaagtacatggggagatcctttctctgctactgtagatgctgttgatgatgccattccaagcttaaatcctttcctcacaaaaagtagtggtgatgttcacctttccatttcttcagatgtatctacttttactactaggacacctactcatgaaatgtttgttggattcactccttctccagttgcacagccacacccttcagctggccttaatgttgactttgaatctgtgtttggaaataaatctacaaatgttattgtagattctgggggctttgatgaactaggtggacttctcaaaccaacagtggcctctcagaaccagaaccttcctgttgccaaactcccacctagcaagttagtatctgatgacttggattcatctttagccaaccttgtgggcaatcttggcatcggaaatggaaccactaagaatgatgtaaattggagtcaaccaggtgaaaagaagttaactgggggatctaactggcaaccaaaggttgcaccaacaaccgcttggaatgctgcaacaatggcaccccctgtaatggcctatcctgctactacaccaacaggcatgataggatatggaattcctccacaaatgggaagtgttcctgtaatgacgcaaccaaccttaatatacagccagcctgtcatgagacctccaaacccctttggccctgtatcaggagcacagatacagtttatgtaacttgatggaagaaaatggaattactccaaaaagacaagtgctcaagcagcaaaatccttacttccagcaaaatccaaactgctgtctcttaaatctcttaaactctcttcttccattagaatgctacaagtaactcagtgaaggcccatgaaggaaattgggactagtttataggagaacgtatcaatacagtttataaagccaagaattgctatgatttaagactaagatctgtctttttggtgactaacccttcaattctttcaactcctgttaatacccataatcagtaacctatcaagaaaagcccttatttggaaagtgtgaaatttgtatttggaaaagctgcctggagagaagaactgtgtcctttactgtatttcaacaggactcttttgggggatcaaaattaaaattcctaattatgcattatctttcttttctccagtcctcacaaatacagaaacaataactgaaattaacttttctttttttaaaaaaaattatattcagtttgcagtagacattccttaagtatttgtatttatttatgattatcaattttacataacattaatattgtatcagacctccttatgaaaatgagtatggatgtgcacagtatgtttgatttttatccacaagaatgaatctgattcagaatgcttttctcagctgacatacagagcactaaatattttaaggcaagtccataggtctgaatctcttaagaattctcggcctctgtgggatttagggaagcattataaatgcattaatccttatagtcaattctgtgcctaggattttgccagggaacagttcactgactaggaaaagcactacattttaaattcagcattagtgcattgggaaggatctttactgctttgtgcttggcatgtcattattttccatttgacattagggcctttccaaaatgaatgtgaggaattgctttcacttcaagactttccttcttttcactaaaactctagaaggtgttacaagggggagggaaggggggcaaagtccttgaacattttctttggctcgtgccatgttatgatcatataccttttaaataaggggaaatagtatctttaaagttaatgtctagccaagagtttagtaaacgaagaattaaactgcactgttgatcggtgctttgtgtaaatacatctttaacatttgggtggagaggggccttaagaaggacagttcattgtaggaaagcaattctgtacatgagtttaagcattcttgttgcattgtctctgcagattctatttttgtttacaatattaaaatgtatgttagcaaaatgggtggattttcaaataaaatgcagcttccacaaaagttttgttatggtattctggtctgagatgcattttcatttttcctttctctttttattatcaatattgtcatttttccctaataaaatatacccaggtgattatatttgttgatctaataacatggaaggtttgttttatatgaattttcaaaaagatgtctctttacactttttgttaccttgtagactcttattgataaatgcaactacttattaaaattgttcactttttgtcttttgaaaaaaaaaaaa

SEQ ID NO: 80 - protein, 652 aa, Homo sapiens
MSGQSLTDRITAAQHSVTGSAVSKTVCKATTHEIMGPKKKHLDYLIQCTNEMNVNIPQLADSLFERTTNSSWVVVFKSLITTHHLMVYGNERFIQYLASRNTLFNLSNFLDKSGLQGYDMSTFIRRYSRYLNEKAVSYRQVAFDFTKVKRGADGVMRTMNTEKLLKTVPIIQNQMDALLDFNVNSNELTNGVINAAFMLLFKDAIRLFAAYNEGIINLLEKYFDMKKNQCKEGLDIYKKFLTRMTRISEFLKVAEQVGIDRGDIPDLSQAPSSLLDALEQHLASLEGKKIKDSTAASRATTLSNAVSSLASTGLSLTKVDEREKQAALEEEQARLKALKEQRLKELAKKPHTSLTTAASPVSTSAGGIMTAPAIDIFSTPSSSNSTSKLPNDLLDLQQPTFHPSVHPMSTASQVASTWGDPFSATVDAVDDAIPSLNPFLTKSSGDVHLSISSDVSTFTTRTPTHEMFVGFTPSPVAQPHPSAGLNVDFESVFGNKSTNVIVDSGGFDELGGLLKPTVASQNQNLPVAKLPPSKLVSDDLDSSLANLVGNLGIGNGTTKNDVNWSQPGEKKLTGGSNWQPKVAPTTAWNAATMAPPVMAYPATTPTGMIGYGIPPQMGSVPVMTQPTLIYSQPVMRPPNPFGPVSGAQIQFM

SEQ ID NO: 81 - DNA, 762 bp, Homo sapiens
atgggccagtgcggcatcacctcctccaagaccgtgctggtctttctcaacctcatcttctggggggcagctggcattttatgctatgtgggagcctatgtcttcatcacttatgatgactatgaccacttctttgaagatgtgtacacgctcatccctgctgtagtgatcatagctgtaggagccctgcttttcatcattgggctaattggctgctgtgccacaatccgggaaagtcgctgtggacttgccacgtttgtcatcatcctgctcttggtttttgtcacagaagttgttgtagtggttttgggatatgtttacagagcaaaggtggaaaatgaggttgatcgcagcattcagaaagtgtataagacctacaatggaaccaaccctgatgctgctagccgggctattgattatgtacagagacagctgcattgttgtggaattcacaactactcagactgggaaaatacagattggttcaaagaaaccaaaaaccagagtgtccctcttagctgctgcagagagactgccagcaattgtaatggcagcctggcccacccttccgacctctatgctgaggggtgtgaggctctagtagtgaagaagctacaagaaatcatgatgcatgtgatctgggccgcactggcatttgcagctattcagctgctgggcatgctgtgtgcttgcatcgtgttgtgcagaaggagtagagatcctgcttacgagctcctcatcactggcggaacctatgcatag

SEQ ID NO: 82 - protein, 253 aa, Homo sapiens
MGQCGITSSKTVLVFLNLIFWGAAGILCYVGAYVFITYDDYDHFFEDVYTLIPAVVIIAVGALLFIIGLIGCCATIRESRCGLATFVIILLLVFVTEVVVVVLGYVYRAKVENEVDRSIQKVYKTYNGTNPDAASRAIDYVQRQLHCCGIHNYSDWENTDWFKETKNQSVPLSCCRETASNCNGSLAHPSDLYAEGCEALVVKKLQEIMMHVIWAALAFAAIQLLGMLCACIVLCRRSRDPAYELLITGGTYA

SEQ ID NO: 83 - DNA, 724 bp, Homo sapiens
caaaggtcagaggtaaagaagtcatggcggcgctgtgtcggacccgtgctgtggctgccgagagccattttctgcgagtgtttctcttcttcaggccctttcggggtgtaggcactgagagtggatccgaaagtggtagttccaatgccaaggagcctaagacgcgcgcaggcggtttcgcgagcgcgttggagcggcactcggagcttctacagaaggtggagcccctacagaagggttctccaaaaaatgtggaatcctttgcatctatgctgagacattctcctcttacacagatgggacctgcaaaggataaactggtcattggacggatctttcatattgtggagaatgatctgtacatagattttggtggaaagtttcattgtgtatgtagaagaccagaagtggatggagagaaataccagaaaggaaccagggtccggttgcggctattagatcttgaacttacgtctaggttcctgggagcaacaacagatacaactgtactagaggctaatgcagttctcttgggaatccaggagagtaaagactcaagatcgaaagaagaacatcatgaaaaataaatgaactttgcttagtggattgactcctttgctgaagtcagttattcatcaagaatgcaattagactaattgtgaataaatgattgaatgaagatataataaataaaagctataattataaaaaaaaaaaaaaaaaa

SEQ ID NO: 84 - protein, 187 aa, Homo sapiens
MAALCRTRAVAAESHFLRVFLFFRPFRGVGTESGSESGSSNAKEPKTRAGGFASALERHSELLQKVEPLQKGSPKNVESFASMLRHSPLTQMGPAKDKLVIGRIFHIVENDLYIDFGGKFHCVCRRPEVDGEKYQKGTRVRLRLLDLELTSRFLGATTDTTVLEANAVLLGIQESKDSRSKEEHHEK

SEQ ID NO: 85 - DNA, 1545 bp, Homo sapiens
tttccgcgagcgccggcactgcccgctccgagcccgtgtctgtcgggtgccgagccaactttcctgcgtccatgcagccccgccggcaacggctgcctgctccctggtccgggcccaggggcccgcgccccaccgccccgctgctcgcgctgctgctgttgctcgccccggtggcggcgcccgcggggtccggggaccccgacgaccctgggcagcctcaggatgctggggtcccgcgcaggctcctgcagcaggcggcgcgcgcggcgcttcacttcttcaacttccggtccggctcgcccagcgcgctacgagtgctggccgaggtgcaggagggccgcgcgtggattaatccaaaagagggatgtaaagttcacgtggtcttcagcacagagcgctacaacccagagtctttacttcaggaaggtgagggacgtttggggaaatgttctgctcgagtgtttttcaagaatcagaaacccagaccaaccatcaatgtaacttgtacacggctcatcgagaaaaagaaaagacaacaagaggattacctgctttacaagcaaatgaagcaactgaaaaaccccttggaaatagtcagcatacctgataatcatggacatattgatccctctctgagactcatctgggatttggctttccttggaagctcttacgtgatgtgggaaatgacaacacaggtgtcacactactacttggcacagctcactagtgtgaggcagtggaaaactaatgatgatacaattgattttgattatactgttctacttcatgaattatcaacacaggaaataattccctgtcgcattcacttggtctggtaccctggcaaacctcttaaagtgaagtaccactgtcaagagctacagacaccagaagaagcctccggaactgaagaaggatcagctgtagtaccaacagagcttagtaatttctaaaaagaaaaaatgatctttttccgacttctaaacaagtgactatactagcataaatcattcttctagtaaaacagctaaggtatagacattctaataatttgggaaaacctatgattacaagtaaaaactcagaaatgcaaagatgttggttttttgtttctcagtctgctttagcttttaactctggaagcgcatgcacactgaactctgctcagtgctaaacagtcaccagcaggttcctcagggtttcagccctaaaatgtaaaacctggataatcagtgtatgttgcaccagaatcagcattttttttttaactgcaaaaaatgatggtctcatctctgaatttatatttctcattcttttgaacatactatagctaatatattttatgttgctaaattgcttctatctagcatgttaaacaaagataatatactttcgatgaaagtaaattataggaaaaaaattaactgttttaaaaagaacttgattatgttttatgatttcaggcaagtattcatttttaacttgctacctacttttaaataaatgtttacatttctaaataaaaaaaaaaaaaaaaaaaaa

SEQ ID NO: 86 - protein, 294 aa, Homo sapiens
MQPRRQRLPAPWSGPRGPRPTAPLLALLLLLAPVAAPAGSGDPDDPGQPQDAGVPRRLLQQAARAALHFFNFRSGSPSALRVLAEVQEGRAWINPKEGCKVHVVFSTERYNPESLLQEGEGRLGKCSARVFFKNQKPRPTINVTCTRLIEKKKRQQEDYLLYKQMKQLKNPLEIVSIPDNHGHIDPSLRLIWDLAFLGSSYVMWEMTTQVSHYYLAQLTSVRQWKTNDDTIDFDYTVLLHELSTQEIIPCRIHLVWYPGKPLKVKYHCQELQTPEEASGTEEGSAVVPTELSNF

SEQ ID NO: 87 - DNA, 2896 bp, Homo sapiens
acgcttgcgcgcgggatttaaactgcggcggtttacgcggcgttaagacttcgtagggttagcgaaattgaggtttcttggtattgcgcgtttctcttccttgctgactctccgaatggccatggactcgtcgcttcaggcccgcctgtttcccggtctcgctatcaagatccaacgcagtaatggtttaattcacagtgccaatgtaaggactgtgaacttggagaaatcctgtgtttcagtggaatgggcagaaggaggtgccacaaagggcaaagagattgattttgatgatgtggctgcaataaacccagaactcttacagcttcttcccttacatccgaaggacaatctgcccttgcaggaaaatgtaacaatccagaaacaaaaacggagatccgtcaactccaaaattcctgctccaaaagaaagtcttcgaagccgctccactcgcatgtccactgtctcagagcttcgcatcacggctcaggagaatgacatggaggtggagctgcctgcagctgcaaactcccgcaagcagttttcagttcctcctgcccccactaggccttcctgccctgcagtggctgaaataccattgaggatggtcagcgaggagatggaagagcaagtccattccatccgaggcagctcttctgcaaaccctgtgaactcagttcggaggaaatcatgtcttgtgaaggaagtggaaaaaatgaagaacaagcgagaagagaagaaggcccagaactctgaaatgagaatgaagagagctcaggagtatgacagtagttttccaaactgggaatttgcccgaatgattaaagaatttcgggctactttggaatgtcatccacttactatgactgatcctatcgaagagcacagaatatgtgtctgtgttaggaaacgcccactgaataagcaagaattggccaagaaagaaattgatgtgatttccattcctagcaagtgtctcctcttggtacatgaacccaagttgaaagtggacttaacaaagtatctggagaaccaagcattctgctttgactttgcatttgatgaaacagcttcgaatgaagttgtctacaggttcacagcaaggccactggtacagacaatctttgaaggtggaaaagcaacttgttttgcatatggccagacaggaagtggcaagacacatactatgggcggagacctctctgggaaagcccagaatgcatccaaagggatctatgccatggcctcccgggacgtcttcctcctgaagaatcaaccctgctaccggaagttgggcctggaagtctatgtgacattcttcgagatctacaatgggaagctgtttgacctgctcaacaagaaggccaagctgcgcgtgctggaggacggcaagcaacaggtgcaagtggtggggctgcaggagcatctggttaactctgctgatgatgtcatcaagatgatcgacatgggcagcgcctgcagaacctctgggcagacatttgccaactccaattcctcccgctcccacgcgtgcttccaaattattcttcgagctaaagggagaatgcatggcaagttctctttggtagatctggcagggaatgagcgaggcgcggacacttccagtgctgaccggcagacccgcatggagggcgcagaaatcaacaagagtctcttagccctgaaggagtgcatcagggccctgggacagaacaaggctcacaccccgttccgtgagagcaagctgacacaggtgctgagggactccttcattggggagaactctaggacttgcatgattgccacgatctcaccaggcataagctcctgtgaatatactttaaacaccctgagatatgcagacagggtcaaggagctgagcccccacagtgggcccagtggagagcagttgattcaaatggaaacagaagagatggaagcctgctctaacggggcgctgattccaggcaatttatccaaggaagaggaggaactgtcttcccagatgtccagctttaacgaagccatgactcagatcagggagctggaggagaaggctatggaagagctcaaggagatcatacagcaaggaccagactggcttgagctctctgagatgaccgagcagccagactatgacctggagacctttgtgaacaaagcggaatctgctctggcccagcaagccaagcatttctcagccctgcgagatgtcatcaaggccttgcgcctggccatgcagctggaagagcaggctagcagacaaataagcagcaagaaacggccccagtgacgactgcaaataaaaatctgtttggtttgacacccagcctcttccctggccctccccagagaactttgggtacctggtgggtctaggcagggtctgagctgggacaggttctggtaaatgccaagtatgggggcatctgggcccagggcagctggggagggggtcagagtgacatgggacactccttttctgttcctcagttgtcgccctcacgagaggaaggagctcttagttacccttttgtgttgcccttctttccatcaaggggaatgttctcagcatagagctttctccgcagcatcctgcctgcgtggactggctgctaatggagagctccctggggttgtcctggctctggggagagagacggagcctttagtacagctatctgctggctctaaaccttctacgcctttgggccgagcactgaatgtcttgtactttaaaaaaatgtttctgagacctctttctactttactgtctccctagagatcctagaggatccctactgttttctgttttatgtgtttatacattgtatgtaacaataaagagaaaaaataaatcagctgtttaagtgtgtggaaaaaaaaaaaaaaaaaa

SEQ ID NO: 88 - protein, 725 aa, Homo sapiens
MAMDSSLQARLFPGLAIKIQRSNGLIHSANVRTVNLEKSCVSVEWAEGGATKGKEIDFDDVAAINPELLQLLPLHPKDNLPLQENVTIQKQKRRSVNSKIPAPKESLRSRSTRMSTVSELRITAQENDMEVELPAAANSRKQFSVPPAPTRPSCPAVAEIPLRMVSEEMEEQVHSIRGSSSANPVNSVRRKSCLVKEVEKMKNKREEKKAQNSEMRMKRAQEYDSSFPNWEFARMIKEFRATLECHPLTMTDPIEEHRICVCVRKRPLNKQELAKKEIDVISIPSKCLLLVHEPKLKVDLTKYLENQAFCFDFAFDETASNEVVYRFTARPLVQTIFEGGKATCFAYGQTGSGKTHTMGGDLSGKAQNASKGIYAMASRDVFLLKNQPCYRKLGLEVYVTFFEIYNGKLFDLLNKKAKLRVLEDGKQQVQVVGLQEHLVNSADDVIKMIDMGSACRTSGQTFANSNSSRSHACFQIILRAKGRMHGKFSLVDLAGNERGADTSSADRQTRMEGAEINKSLLALKECIRALGQNKAHTPFRESKLTQVLRDSFIGENSRTCMIATISPGISSCEYTLNTLRYADRVKELSPHSGPSGEQLIQMETEEMEACSNGALIPGNLSKEEEELSSQMSSFNEAMTQIRELEEKAMEELKEIIQQGPDWLELSEMTEQPDYDLETFVNKAESALAQQAKHFSALRDVIKALRLAMQLEEQASRQISSKKRPQ

SEQ ID NO: 89 - DNA, 1119 bp, Homo sapiens
atggcccccgctccgccccccgccgcctccttctcgccctccgaggtccagcggcgcctggcggccggcgcgtgctgggtccgccgcggggcccgcctctacgacctctccagcttcgtgcggcaccacccggggggcgagcagctgctgcgggccagggcgggccaggacatcagcgccgacctggacgggccgccgcacaggcactcggccaacgcgcgccgctggctggagcagtactacgtgggagagctccgcggggagcagcagggctccatggagaacgagcctgtagcccttgaggaaactcagaagacagatcctgctatggaaccacggttcaaagtggtggattgggacaaggacctggtggactggcgaaagcctctcctgtggcaggtgggccacttgggagagaagtacgatgagtgggttcaccagccggtgaccaggcccatccgcctcttccactcagacctcattgagggcctctctaagactgtctggtacagtgtccccatcatctgggtgcccctggtgctgtatctcagctggtcctactaccgaacctttgcccagggcaacgtccgactcttcacgtcatttacaacagagtacacggtggcagtgcccaagtccatgttccccgggctcttcatgctggggacattcctctggagcctcatcgagtacctcatccaccgcttcctgttccacatgaagccccccagcgacagctattacctcatcatgctgcacttcgtcatgcacggccagcaccacaaggcacccttcgacggctcccgcctggtcttcccccctgtgccagcctccctggtgatcggcgtcttctacttgtgcatgcagctcatcctgcccgaggcagtagggggcactgtgtttgcggggggcctcctgggctacgtcctctatgacatgacccattactacctgcactttggctcgccgcacaagggctcctacctgtacagcctgaaggcccaccacgtcaagcaccactttgcacatcagaagtcaggatttggtatcagcactaaattgtgggattactgtttccacaccctcactccagagaaaccccacctgaagacgcagtga

SEQ ID NO: 90 - protein, 372 aa, Homo sapiens
MAPAPPPAASFSPSEVQRRLAAGACWVRRGARLYDLSSFVRHHPGGEQLLRARAGQDISADLDGPPHRHSANARRWLEQYYVGELRGEQQGSMENEPVALEETQKTDPAMEPRFKVVDWDKDLVDWRKPLLWQVGHLGEKYDEWVHQPVTRPIRLFHSDLIEGLSKTVWYSVPIIWVPLVLYLSWSYYRTFAQGNVRLFTSFTTEYTVAVPKSMFPGLFMLGTFLWSLIEYLIHRFLFHMKPPSDSYYLIMLHFVMHGQHHKAPFDGSRLVFPPVPASLVIGVFYLCMQLILPEAVGGTVFAGGLLGYVLYDMTHYYLHFGSPHKGSYLYSLKAHHVKHHFAHQKSGFGISTKLWDYCFHTLTPEKPHLKTQ

SEQ ID NO: 91 - DNA, 1147 bp, Homo sapiens
accaaatcaaccataggtccaagaacaattgtctctggacggcagctatgcgactcaccgtgctgtgtgctgtgtgcctgctgcctggcagcctggccctgccgctgcctcaggaggcgggaggcatgagtgagctacagtgggaacaggctcaggactatctcaagagattttatctctatgactcagaaacaaaaaatgccaacagtttagaagccaaactcaaggagatgcaaaaattctttggcctacctataactggaatgttaaactcccgcgtcatagaaataatgcagaagcccagatgtggagtgccagatgttgcagaatactcactatttccaaatagcccaaaatggacttccaaagtggtcacctacaggatcgtatcatatactcgagacttaccgcatattacagtggatcgattagtgtcaaaggctttaaacatgtggggcaaagagatccccctgcatttcaggaaagttgtatggggaactgctgacatcatgattggctttgcgcgaggagctcatggggactcctacccatttgatgggccaggaaacacgctggctcatgcctttgcgcctgggacaggtctcggaggagatgctcacttcgatgaggatgaacgctggacggatggtagcagtctagggattaacttcctgtatgctgcaactcatgaacttggccattctttgggtatgggacattcctctgatcctaatgcagtgatgtatccaacctatggaaatggagatccccaaaattttaaactttcccaggatgatattaaaggcattcagaaactatatggaaagagaagtaattcaagaaagaaatagaaacttcaggcagaacatccattcattcattcattggattgtatatcattgttgcacaatcagaattgataagcactgttcctccactccatttagcaattatgtcacccttttttattgcagttggtttttgaatgtctttcactccttttaaggataaactcctttatggtgtgactgtgtcttattcatctatacttgcagtgggtagatgtcaataaatgttacatacacaaataaataaaatgtttattccatggtaaatttaaaaaaaaaaaaaaaaaaaaaaaaaaaaa

SEQ ID NO: 92 - protein, 267 aa, Homo sapiens
MRLTVLCAVCLLPGSLALPLPQEAGGMSELQWEQAQDYLKRFYLYDSETKNANSLEAKLKEMQKFFGLPITGMLNSRVIEIMQKPRCGVPDVAEYSLFPNSPKWTSKVVTYRIVSYTRDLPHITVDRLVSKALNMWGKEIPLHFRKVVWGTADIMIGFARGAHGDSYPFDGPGNTLAHAFAPGTGLGGDAHFDEDERWTDGSSLGINFLYAATHELGHSLGMGHSSDPNAVMYPTYGNGDPQNFKLSQDDIKGIQKLYGKRSNSRKK

SEQ ID NO: 93 - DNA, 3925 bp, Homo sapiens
cggagcgggaggggaggcttcgcggaacgctctcggcgccaggactcgcgtgcaaagcccaggcccgggcggccagaccaagagggaagaagcacagaattcctcaactcccagtgtgcccatgagtaagagcaaatgctccgtgggactcatgtcttccgtggtggccccggctaaggagcccaatgccgtgggcccgaaggaggtggagctcatccttgtcaaggagcagaacggagtgcagctcaccagctccaccctcaccaacccgcggcagagccccgtggaggcccaggatcgggagacctggggcaagaagatcgactttctcctgtccgtcattggctttgctgtggacctggccaacgtctggcggttcccctacctgtgctacaaaaatggtggcggtgccttcctggtcccctacctgctcttcatggtcattgctgggatgccacttttctacatggagctggccctcggccagttcaacagggaaggggccgctggtgtctggaagatctgccccatactgaaaggtgtgggcttcacggtcatcctcatctcactgtatgtcggcttcttctacaacgtcatcatcgcctgggcgctgcactatctcttctcctccttcaccacggagctcccctggatccactgcaacaactcctggaacagccccaactgctcggatgcccatcctggtgactccagtggagacagctcgggcctcaacgacacttttgggaccacacctgctgccgagtactttgaacgtggcgtgctgcacctccaccagagccatggcatcgacgacctggggcctccgcggtggcagctcacagcctgcctggtgctggtcatcgtgctgctctacttcagcctctggaagggcgtgaagacctcagggaaggtggtatggatcacagccaccatgccatacgtggtcctcactgccctgctcctgcgtggggtcaccctccctggagccatagacggcatcagagcatacctgagcgttgacttctaccggctctgcgaggcgtctgtttggattgacgcggccacccaggtgtgcttctccctgggcgtggggttcggggtgctgatcgccttctccagctacaacaagttcaccaacaactgctacagggacgcgattgtcaccacctccatcaactccctgacgagcttctcctccggcttcgtcgtcttctccttcctggggtacatggcacagaagcacagtgtgcccatcggggacgtggccaaggacgggccagggctgatcttcatcatctacccggaagccatcgccacgctccctctgtcctcagcctgggccgtggtcttcttcatcatgctgctcaccctgggtatcgacagcgccatgggtggtatggagtcagtgatcaccgggctcatcgatgagttccagctgctgcacagacaccgtgagctcttcacgctcttcatcgtcctggcgaccttcctcctgtccctgttctgcgtcaccaacggtggcatctacgtcttcacgctcctggaccattttgcagccggcacgtccatcctctttggagtgctcatcgaagccatcggagtggcctggttctatggtgttgggcagttcagcgacgacatccagcagatgaccgggcagcggcccagcctgtactggcggctgtgctggaagctggtcagcccctgctttctcctgttcgtggtcgtggtcagcattgtgaccttcagacccccccactacggagcctacatcttccccgactgggccaacgcgctgggctgggtcatcgccacatcctccatggccatggtgcccatctatgcggcctacaagttctgcagcctgcctgggtcctttcgagagaaactggcctacgccattgcacccgagaaggaccgtgagctggtggacagaggggaggtgcgccagttcacgctccgccactggctcaaggtgtagagggagcagagacgaagaccccaggaagtcatcctgcaatgggagagacacgaacaaaccaaggaaatctaagtttcgagagaaaggagggcaacttctactcttcaacctctactgaaaacacaaacaacaaagcagaagactcctctcttctgactgtttacacctttccgtgccgggagcgcacctcgccgtgtcttgtgttgctgtaataacgacgtagatctgtgcagcgaggtccaccccgttgttgtccctgcagggcagaaaaacgtctaacttcatgctgtctgtgtgaggctccctccctccctgctccctgctcccggctctgaggctgccccaggggcactgtgttctcaggcggggatcacgatccttgtagacgcacctgctgagaatccccgtgctcacagtagcttcctagaccatttactttgcccatattaaaaagccaagtgtcctgcttggtttagctgtgcagaaggtgaaatggaggaaaccacaaattcatgcaaagtcctttcccgatgcgtggctcccagcagaggccgtaaattgagcgttcagttgacacattgcacacacagtctgttcagaggcattggaggatgggggtcctggtatgtctcaccaggaaattctgtttatgttcttgcagcagagagaaataaaactccttgaaaccagctcaggctactgccactcaggcagcctgtgggtccttgcggtgtagggaacggcctgagaggagcgtgtcctatccccggacgcatgcagggcccccacaggagcgtgtcctatccccggacgcatgcagggcccccacaggagcatgtcctatccctggacgcatgcagggcccccacaggagcgtgtactaccccagaacgcatgcagggcccccacaggagcgtgtactaccccaggacgcatgcagggcccccactggagcgtgtactaccccaggacgcatgcagggcccccacaggagcgtgtcctatccccggaccggacgcatgcagggcccccacaggagcgtgtactaccccaggacgcatgcagggcccccacaggagcgtgtactaccccaggatgcatgcagggcccccacaggagcgtgtactaccccaggacgcatgcagggcccccatgcaggcagcctgcagaccacactctgcctggccttgagccgtgacctccaggaagggaccccactggaattttatttctctcaggtgcgtgccacatcaataacaacagtttttatgtttgcgaatggctttttaaaatcatatttacctgtgaatcaaaacaaattcaagaatgcagtatccgcgagcctgcttgctgatattgcagtttttgtttacaagaataattagcaatactgagtgaaggatgttggccaaaagctgctttccatggcacactgccctctgccactgacaggaaagtggatgccatagtttgaattcatgcctcaagtcggtgggcctgcctacgtgctgcccgagggcaggggccgtgcagggccagtcatggctgtcccctgcaagtggacgtgggctccagggactggagtgtaatgctcggtgggagccgtcagcctgtgaactgccaggcagctgcagttagcacagaggatggcttccccattgccttctggggagggacacagaggacggcttccccatcgccttctggccgctgcagtcagcacagagagcggcttccccattgccttctggggagggacacagaggacagcttccccatcgccttctggctgctgcagtcagcacagagagcggcttccccatcgccttctggggaggggctccgtgtagcaacccaggtgttgtccgtgtctgttgaccaatctctattcagcatcgtgtgggtccctaagcacaataaaagacatccacaatggaaaaa

SEQ ID NO: 94 - protein, 620 aa, Homo sapiens
MSKSKCSVGLMSSVVAPAKEPNAVGPKEVELILVKEQNGVQLTSSTLTNPRQSPVEAQDRETWGKKIDFLLSVIGFAVDLANVWRFPYLCYKNGGGAFLVPYLLFMVIAGMPLFYMELALGQFNREGAAGVWKICPILKGVGFTVILISLYVGFFYNVIIAWALHYLFSSFTTELPWIHCNNSWNSPNCSDAHPGDSSGDSSGLNDTFGTTPAAEYFERGVLHLHQSHGIDDLGPPRWQLTACLVLVIVLLYFSLWKGVKTSGKVVWITATMPYVVLTALLLRGVTLPGAIDGIRAYLSVDFYRLCEASVWIDAATQVCFSLGVGFGVLIAFSSYNKFTNNCYRDAIVTTSINSLTSFSSGFVVFSFLGYMAQKHSVPIGDVAKDGPGLIFIIYPEAIATLPLSSAWAVVFFIMLLTLGIDSAMGGMESVITGLIDEFQLLHRHRELFTLFIVLATFLLSLFCVTNGGIYVFTLLDHFAAGTSILFGVLIEAIGVAWFYGVGQFSDDIQQMTGQRPSLYWRLCWKLVSPCFLLFVVVVSIVTFRPPHYGAYIFPDWANALGWVIATSSMAMVPIYAAYKFCSLPGSFREKLAYAIAPEKDRELVDRGEVRQFTLRHWLKV

SEQ ID NO: 95 - DNA, 4304 bp, Homo sapiens
cacacggactacaggggagttttgttgaagttgcaaagtcctggagcctccagagggctgtcggcgcagtagcagcgagcagcagagtccgcacgctccggcgaggggcagaagagcgcgagggagcgcggggcagcagaagcgagagccgagcgcggacccagccaggacccacagccctccccagctgcccaggaagagccccagccatggaacaccagctcctgtgctgcgaagtggaaaccatccgccgcgcgtaccccgatgccaacctcctcaacgaccgggtgctgcgggccatgctgaaggcggaggagacctgcgcgccctcggtgtcctacttcaaatgtgtgcagaaggaggtcctgccgtccatgcggaagatcgtcgccacctggatgctggaggtctgcgaggaacagaagtgcgaggaggaggtcttcccgctggccatgaactacctggaccgcttcctgtcgctggagcccgtgaaaaagagccgcctgcagctgctgggggccacttgcatgttcgtggcctctaagatgaaggagaccatccccctgacggccgagaagctgtgcatctacaccgacaactccatccggcccgaggagctgctgcaaatggagctgctcctggtgaacaagctcaagtggaacctggccgcaatgaccccgcacgatttcattgaacacttcctctccaaaatgccagaggcggaggagaacaaacagatcatccgcaaacacgcgcagaccttcgttgccctctgtgccacagatgtgaagttcatttccaatccgccctccatggtggcagcggggagcgtggtggccgcagtgcaaggcctgaacctgaggagccccaacaacttcctgtcctactaccgcctcacacgcttcctctccagagtgatcaagtgtgacccggactgcctccgggcctgccaggagcagatcgaagccctgctggagtcaagcctgcgccaggcccagcagaacatggaccccaaggccgccgaggaggaggaagaggaggaggaggaggtggacctggcttgcacacccaccgacgtgcgggacgtggacatctgagggcgccaggcaggcgggcgccaccgccacccgcagcgagggcggagccggccccaggtgctcccctgacagtccctcctctccggagcattttgataccagaagggaaagcttcattctccttgttgttggttgttttttcctttgctctttcccccttccatctctgacttaagcaaaagaaaaagattacccaaaaactgtctttaaaagagagagagagaaaaaaaaaatagtatttgcataaccctgagcggtgggggaggagggttgtgctacagatgatagaggattttataccccaataatcaactcgtttttatattaatgtacttgtttctctgttgtaagaataggcattaacacaaaggaggcgtctcgggagaggattaggttccatcctttacgtgtttaaaaaaaagcataaaaacattttaaaaacatagaaaaattcagcaaaccatttttaaagtagaagagggttttaggtagaaaaacatattcttgtgcttttcctgataaagcacagctgtagtggggttctaggcatctctgtactttgcttgctcatatgcatgtagtcactttataagtcattgtatgttattatattccgtaggtagatgtgtaacctcttcaccttattcatggctgaagtcacctcttggttacagtagcgtagcgtgcccgtgtgcatgtcctttgcgcctgtgaccaccaccccaacaaaccatccagtgacaaaccatccagtggaggtttgtcgggcaccagccagcgtagcagggtcgggaaaggccacctgtcccactcctacgatacgctactataaagagaagacgaaatagtgacataatatattctatttttatactcttcctatttttgtagtgacctgtttatgagatgctggttttctacccaacggccctgcagccagctcacgtccaggttcaacccacagctacttggtttgtgttcttcttcatattctaaaaccattccatttccaagcactttcagtccaataggtgtaggaaatagcgctgtttttgttgtgtgtgcagggagggcagttttctaatggaatggtttgggaatatccatgtacttgtttgcaagcaggactttgaggcaagtgtgggccactgtggtggcagtggaggtggggtgtttgggaggctgcgtgccagtcaagaagaaaaaggtttgcattctcacattgccaggatgataagttcctttccttttctttaaagaagttgaagtttaggaatcctttggtgccaactggtgtttgaaagtagggacctcagaggtttacctagagaacaggtggtttttaagggttatcttagatgtttcacaccggaaggtttttaaacactaaaatatataatttatagttaaggctaaaaagtatatttattgcagaggatgttcataaggccagtatgatttataaatgcaatctccccttgatttaaacacacagatacacacacacacacacacacacacaaaccttctgcctttgatgttacagatttaatacagtttatttttaaagatagatccttttataggtgagaaaaaaacaatctggaagaaaaaaaccacacaaagacattgattcagcctgtttggcgtttcccagagtcatctgattggacaggcatgggtgcaaggaaaattagggtactcaacctaagttcggttccgatgaattcttatcccctgccccttcctttaaaaaacttagtgacaaaatagacaatttgcacatcttggctatgtaattcttgtaatttttatttaggaagtgttgaagggaggtggcaagagtgtggaggctgacgtgtgagggaggacaggcgggaggaggtgtgaggaggaggctcccgaggggaaggggcggtgcccacaccggggacaggccgcagctccattttcttattgcgctgctaccgttgacttccaggcacggtttggaaatattcacatcgcttctgtgtatctctttcacattgtttgctgctattggaggatcagttttttgttttacaatgtcatatactgccatgtactagttttagttttctcttagaacattgtattacagatgccttttttgtagttttttttttttttatgtgatcaattttgacttaatgtgattactgctctattccaaaaaggttgctgtttcacaatacctcatgcttcacttagccatggtggacccagcgggcaggttctgcctgctttggcgggcagacacgcgggcgcgatcccacacaggctggcgggggccggccccgaggccgcgtgcgtgagaaccgcgccggtgtccccagagaccaggctgtgtccctcttctcttccctgcgcctgtgatgctgggcacttcatctgatcgggggcgtagcatcatagtagtttttacagctgtgttattctttgcgtgtagctatggaagttgcataattattattattattattataacaagtgtgtcttacgtgccaccacggcgttgtacctgtaggactctcattcgggatgattggaatagcttctggaatttgttcaagttttgggtatgtttaatctgttatgtactagtgttctgtttgttattgttttgttaattacaccataatgctaatttaaagagactccaaatctcaatgaagccagctcacagtgctgtgtgccccggtcacctagcaagctgccgaaccaaaagaatttgcaccccgctgcgggcccacgtggttggggccctgccctggcagggtcatcctgtgctcggaggccatctcgggcacaggcccaccccgccccacccctccagaacacggctcacgcttacctcaaccatcctggctgcggcgtctgtctgaaccacgcgggggccttgagggacgctttgtctgtcgtgatggggcaagggcacaagtcctggatgttgtgtgtatcgagaggccaaaggctggtggcaagtgcacggggcacagcggagtctgtcctgtgacgcgcaagtctgagggtctgggcggcgggcggctgggtctgtgcatttctggttgcaccgcggcgcttcccagcaccaacatgtaaccggcatgtttccagcagaagacaaaaagacaaacatgaaagtctagaaataaaactggtaaaaccccaaaaaaaaaaaaaaaa

SEQ ID NO: 96 - protein, 295 aa, Homo sapiens
MEHQLLCCEVETIRRAYPDANLLNDRVLRAMLKAEETCAPSVSYFKCVQKEVLPSMRKIVATWMLEVCEEQKCEEEVFPLAMNYLDRFLSLEPVKKSRLQLLGATCMFVASKMKETIPLTAEKLCIYTDNSIRPEELLQMELLLVNKLKWNLAAMTPHDFIEHFLSKMPEAEENKQIIRKHAQTFVALCATDVKFISNPPSMVAAGSVVAAVQGLNLRSPNNFLSYYRLTRFLSRVIKCDPDCLRACQEQIEALLESSLRQAQQNMDPKAAEEEEEEEEEVDLACTPTDVRDVDI

SEQ ID NO: 97 - DNA, 4752 bp, Homo sapiens
agtgtgcaggcaggcgggggtgcgcggggcggtcagcgatctgcagcttcgcggggacagagatgtaacccaactcgttcacggatgttccgcgcgccgtgtcaccggctgcgggccaggggtactcggaaggcgcgggcaggagcctggcgaggatgcaccttcccctgccttggaaagggaatggagaggccggcggcccgggagccgcatgggcccgacgcgctgcggcgcttccagggactgctgctggaccgccgaggccggctgcacggccaggtgctgcgcctgcgcgaggtggcccggcgcctggagcgcctgcgcaggcgctccctcgtagccaacgtggccggcagctcgctgagcgcaacgggcgccctcgccgccatcgtggggctctcgctcagcccggtcaccctggggacctcgctgctggtgtcggccgtggggctgggggtggccacagccggaggggccgtcaccatcacgtccgatctctcgctgatcttctgcaactcccgggagctgcggagggtgcaggagatcgcggccacctgccaggaccagatgcgagagatcctgagctgcctcgagtttttctgccgctggcagggctgcggggaccgccagctgctgcagtgcgggaggaacgcctccatcgccctgtacaattctgtctacttcatcgtcttctttggctcacgtggcttcctcatccccaggcgggcggagggggacaccaaggttagccaggccgtgctgaaggccaagattcagaaactggccgagagcctggagtcctgcaccggggctctggacgaactcagcgagcagctggagtctcgggttcagctctgcaccaagtccagtcgtggccacgacctcaagatctctgctgaccagcgtgcagggctgtttttctgagaacatcctttccccctaatgaccgaggccagcaaatcatcctcatgggatgctccagaatttgtagctcccttaggaaaacaccaagctgggttaggagccgaaggcaaaggatgagaaaaactgtttttgaagtgggcaggtccccaaagcccttcttttcccatcactgtgacatctgcctgggcttgagtgctacggacttttcagtcttcctagtggaaaaatgtgacccaaaaactctttttcctttatcaaaaactttctgtctaaacacagctgggcaggcactcctgttttaaagttatttcggggtccctgaccctgccctggtggcttggcctgagactggagagagtgccatcctctgggtcctctccaagtcctactagtctttgaagtcctcaaaatgtgcgtgaggaaggcgtttgcctctattccagaatttctgatacaaagaactccagaatccagagcaaatcagcccttctctgaacgttgtaggatggttcagaacccagagaggaccctggtgctgatatctcctcctcttccctttcccctcagcttacttactcccagatgcggcctgggtatgaagtaggcctttcctgagtggctcccaatccagtcctccaagtactcagaggggaagcccgtgaagccgtcatctaagtcctgctccctcacatgaagctgagggccagatagatggagcgactgccaacttcatttcccgacatcattgtgttcagaagagagtgatgggttttgagttagacagtcctgggcttgagacaggctttgtcactactgtgtgagtgtagccacctaatctctctgagactgtgtaaaacaaagatgataaaatctcaccctgttgtgagatattaaatgagccaaagtgcctagcatgatggtgctggctcatatagtgtagtccctggaatggcaaattaacatcacccaggaacttgttagaaaggcaaattcttggacacaaccctcctgatttatggaatcagaaactctggctgtggggcccagcaacctgagtttaaacaatttctctgggtggttctgcggcacactaaggtttgaaaatcactgcaacaaatgctaacttctaatccccttgatgagctttcacgaagtctcacggcttctctagggactccatggtcttcagagtcgttcacagatgaccaaggacagactgtgtcccagaagccaaaatgagagagagagagagagagcacgcgtacgtgcaccctggggcagtgtctcaccgtatgaacaagggatgtaacactaaaagcccattagggggcagtgtttcccgcctgttgtagaaactggtacagaaaggaatatgaagttcctgaaactgacctttgtctattattaccttctctgaaaagtgccagtccatgtattttttatttattttaagtttgtaatttaatttttaattattgtttagtgtttgcatttaattttatttaatcaccacatttagaaaataataagagcaagtttctaaatgggagactgctgaggctctttgcaagagatgagattaagtttgagtttctaaggcagggcatgagctggaaatagcattgctttccttgattgtctctctccttcagggagattctttttctctagtgttttaagtgatcctttgaagtaagtgtggagagtcttgaatggcaagaccaggagctgagtttaagcttgtaatggaagcttgcattgtgggatatataactgaggaagcatatttatcctgaaggtattttgccagaaggtatcacttgacctggaaaaggaatctatttagttcaggaaagataaaaagtttagaggtatgtgaaggaagcacttagaacttgcaagcctgatgtcctatcaagttatgtcttctgggtgacagacaaaatcgcttgtcttatggtggtgatgtgttgcattttcactttggggtctgtaagaaactgtcagtgaaaatatgtacaattccttcaatttccattcttaacaactgtaatgttgaaaaataagttgaaaagtctttgggaccatacatgcaaaaacggtgcctctgttacttaattatttaatattctataaatgtacccaatctgtccgcacccttcccagtgatggggcagtatgtctgaggaagtataatttcagtactggggtcggggagaggaggtgatgtttctacatttttattttttctataaattgcaattggtctgtatgctggtttattttgaaatttatattggtttcttttcaagctggtgtcatctcctagactgtttcacccagatgctagcattttttttttttttttgagacagagtctcactctgtcacctaggctggagttgcagtggtttgatctcggctcactgcaacctccgactcctgggttcaagcaattcttctgcctcagcctcctgagtagctgggattacagatgtgcaccagcacacccggctaattttttgtatttttagtagagacagggtttcgccatgttggccaggctggtcttgaactcctggccttatgtgatccgcccaccttggcttcccaaagtgctgggattacaggcatgagccacctcgcctggccagatgctagcattttagatcaaacaattcattttagatgaattgttttgtttcacaatcattttaaatcattttagaatgtacttcacattattagttgtgttatggcataaaggtacaaccattccctaactccatcttttattaatgcttaagtttaaattatattcttccaatgcctaagctattccctagaattaaactgggcacttttggaagcagcaacagtaacagcagcagcaaacttttcctctcatattttgggtgtatcaaaagttctagacttttgaagttatgatttcagtggcccactttatttctaaggaagagtgtctactttggaacgatactttgcacatagtaggaactcaagaaatacatttgaataattataattaactgtttagctatcttaatgagaatttgttgacaacaaaagatcatccatcgccttatgtgtgagtaagattggagcctctatcaagatttagtcaagttcagttagattgattctagaaacaaatatttatttctttcttttacggggatgtgaataaggcttttccttaaggccttcattctttaaacaaacaggttgaaatggtatgttgtaaaagagaagacgggagagaggtatttagatgataagtgtacttcacaaaaatgccaaagtttgaaaaataggtatgtttgttctaaatgtttaagtgcttctctgttaggttctggggcttgcaatcatttgaattgttctgtttcacaataaaggagattcactgggttctgcattttcaggattcaatagaactgctccattaaaaaaataatccttagcaagcattcgaatcctaactgctttgatgcacttgccctcgggcacctgtcatttccaatatggtaggtgtcaaagtcaaaagtatttactgggagaaaaaagagaggagtggttgtagaagtctccctaaatcagacatgtcaagcaatcagccaacgtggtgtatttctcattcaatattttagtgtgaattgagacactgagataaagacatcgtgcagagataaatggggatacagttaaatgtagcaactcttgagttcattttttcccactgtagcaaaattaatgctttctctttattgaaataaattgctcattcctcaaaaaaaaaaaaaaaaa

SEQ ID NO: 98 - protein, 279 aa, Homo sapiens
MFRAPCHRLRARGTRKARAGAWRGCTFPCLGKGMERPAAREPHGPDALRRFQGLLLDRRGRLHGQVLRLREVARRLERLRRRSLVANVAGSSLSATGALAAIVGLSLSPVTLGTSLLVSAVGLGVATAGGAVTITSDLSLIFCNSRELRRVQEIAATCQDQMREILSCLEFFCRWQGCGDRQLLQCGRNASIALYNSVYFIVFFGSRGFLIPRRAEGDTKVSQAVLKAKIQKLAESLESCTGALDELSEQLESRVQLCTKSSRGHDLKISADQRAGLFF

SEQ ID NO: 99 - DNA, 3060 bp, Homo sapiens
gagccagcgaggagtgaagctgagcctggcctcacacgctcctagaggaccacctcctgagagagttctttcaccccctcttctttctccaagctcccctcctgctctccctccctgcccaatacaatgcattcttgagtggcagcgtctggactccaggcagccccagagaaccgaagcaagccaaagagaggactggagccaagatactggtgggggagattggatgcctggctttctttgaggacatctttggagcgagggtggctttggggtgggggcttgtgctgcagggaatacagccaggccccaagatggacacttctgggcacttccatgactcgggggtgggggacttggatgaagaccccaagtgcccctgtccatcctctggggatgagcagcagcagcagcagcagcagcaacagcagcagcagccaccaccgccagcgccaccagcagccccccagcagcccctgggaccctcgctgcagcctcagcctccgcagcttcagcagcagcagcagcagcagcagcagcagcagcagcagcagccaccgcatcccctgtctcagctcgcccaactccagagccagcccgtccaccctggcctgctgcactcctctcccaccgctttcagggcccccccttcgtccaactccaccgccatcctccacccttcctccaggcaaggcagccagctcaatctcaatgaccacttgcttggccactctccaagttccacagctacaagtgggcctggcggaggcagccggcaccgacaggccagccccctggtgcaccggcgggacagcaaccccttcacggagatcgccatgagctcctgcaagtatagcggtggggtcatgaagcccctcagccgcctcagcgcctcccggaggaacctcatcgaggccgagactgagggccaacccctccagcttttcagccctagcaaccccccggagatcgtcatctcctcccgggaggacaaccatgcccaccagaccctgctccatcaccctaatgccacccacaaccaccagcatgccggcaccaccgccagcagcaccaccttccccaaagccaacaagcggaaaaaccaaaacattggctataagctgggacacaggagggccctgtttgaaaagagaaagcgactgagtgactatgctctgatttttgggatgtttggaattgttgttatggtgatagagaccgagctctcttggggtttgtactcaaaggactccatgttttcgttggccctgaaatgccttatcagtctgtccaccatcatccttttgggcttgatcatcgcctaccacacacgtgaagtccagctcttcgtgatcgacaatggcgcggatgactggcggatagccatgacctacgagcgcatcctgtacatcagcctggagatgctggtgtgcgccatccaccccattcctggcgagtacaagttcttctggacggcacgcctggccttctcctacacaccctcccgggcggaggccgatgtggacatcatcctgtctatccccatgttcctgcgcctgtacctgatcgcccgagtcatgctgctgcacagcaagctcttcaccgatgcctcgtcccgcagcatcggggccctcaacaagatcaacttcaacacccgctttgtcatgaagacgctcatgaccatctgccctggcactgtgctgctcgtgttcagcatctctctgtggatcattgctgcctggaccgtccgtgtctgtgaaaggtaccatgaccagcaggacgtaactagtaactttctgggtgccatgtggctcatctccatcacattcctttccattggttatggggacatggtgccccacacatactgtgggaaaggtgtctgtctcctcactggcatcatgggtgcaggctgcactgcccttgtggtggccgtggtggcccgaaagctggaactcaccaaagcggagaagcacgttcataacttcatgatggacactcagctcaccaagcggatcaagaatgctgcagccaatgtccttcgggaaacatggttaatctataaacacacaaagctgctaaagaagattgaccatgccaaagtgaggaaacaccagaggaagttcctccaagctatccaccagttgaggagcgtcaagatggaacagaggaagctgagtgaccaagccaacactctggtggacctttccaagatgcagaatgtcatgtatgacttaatcacagaactcaatgaccggagcgaagacctggagaagcagattggcagcctggagtcgaagctggagcatctcaccgccagcttcaactccctgccgctgctcatcgccgacaccctgcgccagcagcagcagcagctcctgtctgccatcatcgaggcccggggtgtcagcgtggcagtgggcaccacccacaccccaatctccgatagccccattggggtcagctccacctccttcccgaccccgtacacaagttcaagcagttgctaaataaatctccccactccagaagcattacccataggtcttaagatgcaaatcaactctctcctggtcgctttgccatcaagaaacattcagaccagggaacggaaagaagagagaccgagctaattaactaactcatgttcattcagcgtgcttggtccgacatgccttgaaaccagaaatctaatctctgtttaggtgcctctacttgggagcgggaagaggagatgacaggaagcgacgcctctggcagggcccttgctgcagagttggtggagaacagaaatccacgctcaatctcaggtcttcacgcggggggtgggggtcagatgcactgaagtagccaacagcgaagccagtccagaagaggggtccgctgggagggagggttgtgtcaggcttgggggatgggctcttcgccatgggggtctttgaacacacctctctcctttccttttgtctacggaagcctctgggtgacaaaagtaaaagagagctgcccacaacttgccaaaacagatatactcgaatcagactgaaaaaaaaaaaaaaa

SEQ ID NO: 100 - protein, 731 aa, Homo sapiens
MDTSGHFHDSGVGDLDEDPKCPCPSSGDEQQQQQQQQQQQQPPPPAPPAAPQQPLGPSLQPQPPQLQQQQQQQQQQQQQQPPHPLSQLAQLQSQPVHPGLLHSSPTAFRAPPSSNSTAILHPSSRQGSQLNLNDHLLGHSPSSTATSGPGGGSRHRQASPLVHRRDSNPFTEIAMSSCKYSGGVMKPLSRLSASRRNLIEAETEGQPLQLFSPSNPPEIVISSREDNHAHQTLLHHPNATHNHQHAGTTASSTTFPKANKRKNQNIGYKLGHRRALFEKRKRLSDYALIFGMFGIVVMVIETELSWGLYSKDSMFSLALKCLISLSTIILLGLIIAYHTREVQLFVIDNGADDWRIAMTYERILYISLEMLVCAIHPIPGEYKFFWTARLAFSYTPSRAEADVDIILSIPMFLRLYLIARVMLLHSKLFTDASSRSIGALNKINFNTRFVMKTLMTICPGTVLLVFSISLWIIAAWTVRVCERYHDQQDVTSNFLGAMWLISITFLSIGYGDMVPHTYCGKGVCLLTGIMGAGCTALVVAVVARKLELTKAEKHVHNFMMDTQLTKRIKNAAANVLRETWLIYKHTKLLKKIDHAKVRKHQRKFLQAIHQLRSVKMEQRKLSDQANTLVDLSKMQNVMYDLITELNDRSEDLEKQIGSLESKLEHLTASFNSLPLLIADTLRQQQQQLLSAIIEARGVSVAVGTTHTPISDSPIGVSSTSFPTPYTSSSSC

SEQ ID NO: 101 - DNA, 6762 bp, Homo sapiens
agacgtgaggcttgcagcaggccgaggaggaagaagaggggcagtgggagcagaggaggtggctcctgccccagtgagagctctgagggtccctgcctgaagagggacagggaccggggcttggagaaggggctgtggaatgcagcccccttcactgctgctgctgctgctgctgctgctgctgctatgtgtctcagtggtcagacccagagggctgctgtgtgggagtttcccagaaccctgtgccaatggaggcacctgcctgagcctgtctctgggacaagggacctgccagtgtgcccctggcttcctgggtgagacgtgccagtttcctgacccctgccagaacgcccagctctgccaaaatggaggcagctgccaagccctgcttcccgctcccctagggctccccagctctccctctccattgacacccagcttcttgtgcacttgcctccctggcttcactggtgagagatgccaggccaagcttgaagacccttgtcctccctccttctgttccaaaaggggccgctgccacatccaggcctcgggccgcccacagtgctcctgcatgcctggatggacaggtgagcagtgccagcttcgggacttctgttcagccaacccatgtgttaatggaggggtgtgtctggccacatacccccagatccagtgccactgcccaccgggcttcgagggccatgcctgtgaacgtgatgtcaacgagtgcttccaggacccaggaccctgccccaaaggcacctcctgccataacaccctgggctccttccagtgcctctgccctgtggggcaggagggtccacgttgtgagctgcgggcaggaccctgccctcctaggggctgttcgaatgggggcacctgccagctgatgccagagaaagactccacctttcacctctgcctctgtcccccaggtttcataggcccagactgtgaggtgaatccagacaactgtgtcagccaccagtgtcagaatgggggcacttgccaggatgggctggacacctacacctgcctctgcccagaaacctggacaggctgggactgctccgaagatgtggatgagtgtgagacccagggtccccctcactgcagaaacgggggcacctgccagaactctgctggtagctttcactgcgtgtgtgtgagtggctggggcggcacaagctgtgaggagaacctggatgactgtattgctgccacctgtgccccgggatccacctgcattgaccgggtgggctctttctcctgcctctgcccacctggacgcacaggactcctgtgccacttggaagacatgtgtctgagccagccgtgccatggggatgcccaatgcagcaccaaccccctcacaggctccacactctgcctgtgtcagcctggctattcggggcccacctgccaccaggacctggacgagtgtctgatggcccagcaaggcccaagtccctgtgaacatggcggttcctgcctcaacactcctggctccttcaactgcctctgtccacctggctacacaggctcccgttgtgaggctgatcacaatgagtgcctctcccagccctgccacccaggaagcacctgtctggacctacttgccaccttccactgcctctgcccgccaggcttagaagggcagctctgtgaggtggagaccaacgagtgtgcctcagctccctgcctgaaccacgcggattgccatgacctgctcaacggcttccagtgcatctgcctgcctggattctccggcacccgatgtgaggaggatatcgatgagtgcagaagctctccctgtgccaatggtgggcagtgccaggaccagcctggagccttccactgcaagtgtctcccaggctttgaagggccacgctgtcaaacagaggtggatgagtgcctgagtgacccatgtcccgttggagccagctgccttgatcttccaggagccttcttttgcctctgcccctctggtttcacaggccagctctgtgaggttcccctgtgtgctcccaacctgtgccagcccaagcagatatgtaaggaccagaaagacaaggccaactgcctctgtcctgatggaagccctggctgtgccccacctgaggacaactgcacctgccaccacgggcactgccagagatcctcatgtgtgtgtgacgtgggttggacggggccagagtgtgaggcagagctagggggctgcatctctgcaccctgtgcccatggggggacctgctacccccagccctctggctacaactgcacctgccctacaggctacacaggacccacctgtagtgaggagatgacagcttgtcactcagggccatgtctcaatggcggctcctgcaaccctagccctggaggctactactgcacctgccctccaagccacacagggccccagtgccaaaccagcactgactactgtgtgtctgccccgtgcttcaatgggggtacctgtgtgaacaggcctggcaccttctcctgcctctgtgccatgggcttccagggcccgcgctgtgagggaaagctccgccccagctgtgcagacagcccctgtaggaatagggcaacctgccaggacagccctcagggtccccgctgcctctgccccactggctacaccggaggcagctgccagactctgatggacttatgtgcccagaagccctgcccacgcaattcccactgcctccagactgggccctccttccactgcttgtgcctccagggatggaccgggcctctctgcaaccttccactgtcctcctgccagaaggctgcactgagccaaggcatagacgtctcttccctttgccacaatggaggcctctgtgtcgacagcggcccctcctatttctgccactgcccccctggattccaaggcagcctgtgccaggatcacgtgaacccatgtgagtccaggccttgccagaacggggccacctgcatggcccagcccagtgggtatctctgccagtgtgccccaggctacgatggacagaactgctcaaaggaactcgatgcttgtcagtcccaaccctgtcacaaccatggaacctgtactcccaaacctggaggattccactgtgcctgccctccaggctttgtggggctacgctgtgagggagacgtggacgagtgtctggaccagccctgccaccccacaggcactgcagcctgccactctctggccaatgccttctactgccagtgtctgcctggacacacaggccagtggtgtgaggtggagatagacccctgccacagccaaccctgctttcatggagggacctgtgaggccacagcaggatcacccctgggtttcatctgccactgccccaagggttttgaaggccccacctgcagccacagggccccttcctgcggcttccatcactgccaccacggaggcctgtgtctgccctcccctaagccaggcttcccaccacgctgtgcctgcctcagtggctatgggggtcctgactgcctgaccccaccagctcctaaaggctgtggccctccctccccatgcctatacaatggcagctgctcagagaccacgggcttggggggcccaggctttcgatgctcctgccctcacagctctccagggccccggtgtcagaaacccggagccaaggggtgtgagggcagaagtggagatggggcctgcgatgctggctgcagtggcccgggaggaaactgggatggaggggactgctctctgggagtcccagacccctggaagggctgcccctcccactctcggtgctggcttctcttccgggacgggcagtgccacccacagtgtgactctgaagagtgtctgtttgatggctacgactgtgagacccctccagcctgcactccagcctatgaccagtactgccatgatcacttccacaacgggcactgtgagaaaggctgcaacactgcagagtgtggctgggatggaggtgactgcaggcctgaagatggggacccagagtgggggccctccctggccctgctggtggtactgagccccccagccctagaccagcagctgtttgccctggcccgggtgctgtccctgactctgagggtaggactctgggtaaggaaggatcgtgatggcagggacatggtgtacccctatcctggggcccgggctgaagaaaagctaggaggaactcgggaccccacctatcaggagagagcagcccctcaaacgcagcccctgggcaaggagaccgactccctcagtgctgggtttgtggtggtcatgggtgtggatttgtcccgctgtggccctgaccacccggcatcccgctgtccctgggaccctgggcttctactccgcttccttgctgcgatggctgcagtgggagccctggagcccctgctgcctggaccactgctggctgtccaccctcatgcagggaccgcaccccctgccaaccagcttccctggcctgtgctgtgctccccagtggccggggtgattctcctggccctaggggctcttctcgtcctccagctcatccggcgtcgacgccgagagcatggagctctctggctgccccctggtttcactcgacggcctcggactcagtcagctccccaccgacgccggcccccactaggcgaggacagcattggtctcaaggcactgaagccaaaggcagaagttgatgaggatggagttgtgatgtgctcaggccctgaggagggagaggaggtgggccaggctgaagaaacaggcccaccctccacgtgccagctctggtctctgagtggtggctgtggggcgctccctcaggcagccatgctaactcctccccaggaatctgagatggaagcccctgacctggacacccgtggacctgatggggtgacacccctgatgtcagcagtttgctgtggggaagtacagtccgggaccttccaaggggcatggttgggatgtcctgagccctgggaacctctgctggatggaggggcctgtccccaggctcacaccgtgggcactggggagacccccctgcacctggctgcccgattctcccggccaaccgctgcccgccgcctccttgaggctggagccaaccccaaccagccagaccgggcagggcgcacaccccttcatgctgctgtggctgctgatgctcgggaggtctgccagcttctgctccgtagcagacaaactgcagtggacgctcgcacagaggacgggaccacacccttgatgctggctgccaggctggcggtggaagacctggttgaagaactgattgcagcccaagcagacgtgggggccagagataaatgggggaaaactgcgctgcactgggctgctgccgtgaacaacgcccgagccgcccgctcgcttctccaggccggagccgataaagatgcccaggacaacagggagcagacgccgctattcctggcggcgcgggaaggagcggtggaagtagcccagctactgctggggctgggggcagcccgagagctgcgggaccaggctgggctagcgccggcggacgtcgctcaccaacgtaaccactgggatctgctgacgctgctggaaggggctgggccaccagaggcccgtcacaaagccacgccgggccgcgaggctgggcccttcccgcgcgcacggacggtgtcagtaagcgtgcccccgcatgggggcggggctctgccgcgctgccggacgctgtcagccggagcaggccctcgtgggggcggagcttgtctgcaggctcggacttggtccgtagacttggctgcgcgggggggcggggcctattctcattgccggagcctctcgggagtaggagcaggaggaggcccgacccctcgcggccgtaggttttctgcaggcatgcgcgggcctcggcccaaccctgcgataatgcgaggaagatacggagtggctgccgggcgcggaggcagggtctcaacggatgactggccctgtgattgggtggccctgggagcttgcggttctgcctccaacattccgatcccgcctccttgccttactccgtccccggagcggggatcacctcaacttgactgtggtcccccagccctccaagaaatgcccataaaccaaggaggagagggtaaaaaatagaagaatacatggtagggaggaattccaaaaatgattacccattaaaaggcaggctggaaggccttcctggttttaagatggatcccccaaaatgaagggttgtgagtttagtttctctcctaaaatgaatgtatgcccaccagagcagacatcttccacgtggagaagctgcagctctggaaagagggtttaagatgctaggatgaggcaggcccagtcctcctccagaaaataagacaggccacaggagggcagagtggagtggaaatacccctaagttggaaccaagaattgcaggcatatgggatgtaagatgttctttcctatatatggtttccaaagggtgcccctatgatccattgtccccactgcccacaaatggctgacaaatatttattgggcacctactatgtgccaggcactgtgtaggtgctgaaaagtggccaagggccacccccgctgatgactccttgcattccctcccctcacaacaaagaactccactgtggggatgaagcgcttcttctagccactgctatcgctatttaagaaccctaaatctgtcacccataataaagctgatttgaagtgttaaaaaaaaaaaaaaaaaa

SEQ ID NO: 102 - protein, 2003 aa, Homo sapiens
MQPPSLLLLLLLLLLLCVSVVRPRGLLCGSFPEPCANGGTCLSLSLGQGTCQCAPGFLGETCQFPDPCQNAQLCQNGGSCQALLPAPLGLPSSPSPLTPSFLCTCLPGFTGERCQAKLEDPCPPSFCSKRGRCHIQASGRPQCSCMPGWTGEQCQLRDFCSANPCVNGGVCLATYPQIQCHCPPGFEGHACERDVNECFQDPGPCPKGTSCHNTLGSFQCLCPVGQEGPRCELRAGPCPPRGCSNGGTCQLMPEKDSTFHLCLCPPGFIGPDCEVNPDNCVSHQCQNGGTCQDGLDTYTCLCPETWTGWDCSEDVDECETQGPPHCRNGGTCQNSAGSFHCVCVSGWGGTSCEENLDDCIAATCAPGSTCIDRVGSFSCLCPPGRTGLLCHLEDMCLSQPCHGDAQCSTNPLTGSTLCLCQPGYSGPTCHQDLDECLMAQQGPSPCEHGGSCLNTPGSFNCLCPPGYTGSRCEADHNECLSQPCHPGSTCLDLLATFHCLCPPGLEGQLCEVETNECASAPCLNHADCHDLLNGFQCICLPGFSGTRCEEDIDECRSSPCANGGQCQDQPGAFHCKCLPGFEGPRCQTEVDECLSDPCPVGASCLDLPGAFFCLCPSGFTGQLCEVPLCAPNLCQPKQICKDQKDKANCLCPDGSPGCAPPEDNCTCHHGHCQRSSCVCDVGWTGPECEAELGGCISAPCAHGGTCYPQPSGYNCTCPTGYTGPTCSEEMTACHSGPCLNGGSCNPSPGGYYCTCPPSHTGPQCQTSTDYCVSAPCFNGGTCVNRPGTFSCLCAMGFQGPRCEGKLRPSCADSPCRNRATCQDSPQGPRCLCPTGYTGGSCQTLMDLCAQKPCPRNSHCLQTGPSFHCLCLQGWTGPLCNLPLSSCQKAALSQGIDVSSLCHNGGLCVDSGPSYFCHCPPGFQGSLCQDHVNPCESRPCQNGATCMAQPSGYLCQCAPGYDGQNCSKELDACQSQPCHNHGTCTPKPGGFHCACPPGFVGLRCEGDVDECLDQPCHPTGTAACHSLANAFYCQCLPGHTGQWCEVEIDPCHSQPCFHGGTCEATAGSPLGFICHCPKGFEGPTCSHRAPSCGFHHCHHGGLCLPSPKPGFPPRCACLSGYGGPDCLTPPAPKGCGPPSPCLYNGSCSETTGLGGPGFRCSCPHSSPGPRCQKPGAKGCEGRSGDGACDAGCSGPGGNWDGGDCSLGVPDPWKGCPSHSRCWLLFRDGQCHPQCDSEECLFDGYDCETPPACTPAYDQYCHDHFHNGHCEKGCNTAECGWDGGDCRPEDGDPEWGPSLALLVVLSPPALDQQLFALARVLSLTLRVGLWVRKDRDGRDMVYPYPGARAEEKLGGTRDPTYQERAAPQTQPLGKETDSLSAGFVVVMGVDLSRCGPDHPASRCPWDPGLLLRFLAAMAAVGALEPLLPGPLLAVHPHAGTAPPANQLPWPVLCSPVAGVILLALGALLVLQLIRRRRREHGALWLPPGFTRRPRTQSAPHRRRPPLGEDSIGLKALKPKAEVDEDGVVMCSGPEEGEEVGQAEETGPPSTCQLWSLSGGCGALPQAAMLTPPQESEMEAPDLDTRGPDGVTPLMSAVCCGEVQSGTFQGAWLGCPEPWEPLLDGGACPQAHTVGTGETPLHLAARFSRPTAARRLLEAGANPNQPDRAGRTPLHAAVAADAREVCQLLLRSRQTAVDARTEDGTTPLMLAARLAVEDLVEELIAAQADVGARDKWGKTALHWAAAVNNARAARSLLQAGADKDAQDNREQTPLFLAAREGAVEVAQLLLGLGAARELRDQAGLAPADVAHQRNHWDLLTLLEGAGPPEARHKATPGREAGPFPRARTVSVSVPPHGGGALPRCRTLSAGAGPRGGGACLQARTWSVDLAARGGGAYSHCRSLSGVGAGGGPTPRGRRFSAGMRGPRPNPAIMRGRYGVAAGRGGRVSTDDWPCDWVALGACGSASNIPIPPPCLTPSPERGSPQLDCGPPALQEMPINQGGEGKK

SEQ ID NO: 103 - DNA, 1655 bp, Homo sapiens
gcccgcccgcgccccgaccagcccggcctcgggcagccactcaccggtgtccccgtccgcgtccttcctccccgggtcccggccatggcgctgagtgaacccatcctgccgtccttctccactttcgccagcccgtgccgcgagcgcggcctgcaggagcgctggccgcgcgccgaacccgagtccggcggcaccgacgacgacctcaacagcgtgctggacttcatcctgtccatggggctggatggcctgggcgccgaggccgccccggagccgccgccgccgcccccgccgcctgcgttctattaccccgaacccggcgcgcccccgccctacagcgcccccgcgggtggcctggtgtctgagctgctgcgacccgagctggatgcgccgctggggcccgcactgcacggccgctttctgctggcgccgcccggccgcctggtcaaggccgagccccctgaagcggacggcggcggcggctacggctgcgcccccgggctgacccgtggaccgcgcggcctcaagcgcgagggcgccccgggcccggcggcttcgtgcatgcgaggtcccgggggccgccccccgccgccgcccgacacaccgccgctcagccccgacggccccgcgcgcctgcccgcgcccggtccgcgcgcctccttcccgccgcctttcggtggccctggtttcggcgcgcccgggcccggcctgcattacgcgccgcctgcgcccccagccttcggtctcttcgacgacgcggccgccgccgcggcagccctgggcctggcgccccccgccgcccgcggtctcctcacgccgcctgcgtccccgctggagctgctggaggccaagccaaagcgcggccgccgctcttggccccgcaaacgcaccgccactcacacctgcagctacgcgggctgcggcaagacctacaccaagagttcgcatctgaaggcgcatctgcgcacgcacacaggtgagaagccctaccactgcaactgggacggctgcggctggaagtttgcgcgctcagacgagctcacgcgccactaccgaaagcacacgggccaccggccattccagtgccatctgtgcgatcgtgccttctcgcgctccgatcacctggcgctgcacatgaaacggcacatgtagccgggacgcccccgcccacctgcgcgcggccgtggcgggtcccacgcgccgggcgcggccccctcccaaactgtgactggtatttattggacccagagaaccgggccgggcacagcgtggctacagagggtctccctcgatgacgacgacgacgacgccaccaccccagcccccgtctgtgactgaaggcccggtgggaaaagaccacgatcctccttgacgagttttgtttttcaaaatggtgcaataatttaagtggcatcttctctcccaccgggtctacactagaggatcgaggcttgtgatgccttgtgagaaataagggccttaatttgtactgtctgcggcattttttataatattgtatatagtgactgacaaatattgtattactgtacatagagagacaggtgggcatttttgggctacctggttcgtttttataagattttgctgggttggttttttttttaattaaaaagttttgcatcttttaaaaaaaa

SEQ ID NO: 104 - protein, 355 aa, Homo sapiens
MALSEPILPSFSTFASPCRERGLQERWPRAEPESGGTDDDLNSVLDFILSMGLDGLGAEAAPEPPPPPPPPAFYYPEPGAPPPYSAPAGGLVSELLRPELDAPLGPALHGRFLLAPPGRLVKAEPPEADGGGGYGCAPGLTRGPRGLKREGAPGPAASCMRGPGGRPPPPPDTPPLSPDGPARLPAPGPRASFPPPFGGPGFGAPGPGLHYAPPAPPAFGLFDDAAAAAAALGLAPPAARGLLTPPASPLELLEAKPKRGRRSWPRKRTATHTCSYAGCGKTYTKSSHLKAHLRTHTGEKPYHCNWDGCGWKFARSDELTRHYRKHTGHRPFQCHLCDRAFSRSDHLALHMKRHM

SEQ ID NO: 105 - DNA, 4134 bp, Homo sapiens
aggcctccctcgccagcggggtgtggctcccctccaaagacggtcggctgacaggctccacagagctccactcacgctcagccctggacggacaggcagtccaacggaacagaaacatccctcagcccacaggcacgatctgttcctcctgggaagatgcagaggctcatgatgctcctcgccacatcgggcgcctgcctgggcctgctggcagtggcagcagtggcagcagcaggtgctaaccctgcccaacgggacacccacagcctgctgcccacccaccggcgccaaaagagagattggatttggaaccagatgcacattgatgaagagaaaaacacctcacttccccatcatgtaggcaagatcaagtcaagcgtgagtcgcaagaatgccaagtacctgctcaaaggagaatatgtgggcaaggtcttccgggtcgatgcagagacaggagacgtgttcgccattgagaggctggaccgggagaatatctcagagtaccacctcactgctgtcattgtggacaaggacactggcgaaaacctggagactccttccagcttcaccatcaaagttcatgacgtgaacgacaactggcctgtgttcacgcatcggttgttcaatgcgtccgtgcctgagtcgtcggctgtggggacctcagtcatctctgtgacagcagtggatgcagacgaccccactgtgggagaccacgcctctgtcatgtaccaaatcctgaaggggaaagagtattttgccatcgataattctggacgtattatcacaataacgaaaagcttggaccgagagaagcaggccaggtatgagatcgtggtggaagcgcgagatgcccagggcctccggggggactcgggcacggccaccgtgctggtcactctgcaagacatcaatgacaacttccccttcttcacccagaccaagtacacatttgtcgtgcctgaagacacccgtgtgggcacctctgtgggctctctgtttgttgaggacccagatgagccccagaaccggatgaccaagtacagcatcttgcggggcgactaccaggacgctttcaccattgagacaaaccccgcccacaacgagggcatcatcaagcccatgaagcctctggattatgaatacatccagcaatacagcttcatcgtcgaggccacagaccccaccatcgacctccgatacatgagccctcccgcgggaaacagagcccaggtcattatcaacatcacagatgtggacgagccccccattttccagcagcctttctaccacttccagctgaaggaaaaccagaagaagcctctgattggcacagtgctggccatggaccctgatgcggctaggcatagcattggatactccatccgcaggaccagtgacaagggccagttcttccgagtcacaaaaaagggggacatttacaatgagaaagaactggacagagaagtctacccctggtataacctgactgtggaggccaaagaactggattccactggaacccccacaggaaaagaatccattgtgcaagtccacattgaagttttggatgagaatgacaatgccccggagtttgccaagccctaccagcccaaagtgtgtgagaacgctgtccatggccagctggtcctgcagatctccgcaatagacaaggacataacaccacgaaacgtgaagttcaaattcatcttgaatactgagaacaactttaccctcacggataatcacgataacacggccaacatcacagtcaagtatgggcagtttgaccgggagcataccaaggtccacttcctacccgtggtcatctcagacaatgggatgccaagtcgcacgggcaccagcacgctgaccgtggccgtgtgcaagtgcaacgagcagggcgagttcaccttctgcgaggatatggccgcccaggtgggcgtgagcatccaggcagtggtagccatcttactctgcatcctcaccatcacagtgatcaccctgctcatcttcctgcggcggcggctccggaagcaggcccgcgcgcacggcaagagcgtgccggagatccacgagcagctggtcacctacgacgaggagggcggcggcgagatggacaccaccagctacgatgtgtcggtgctcaactcggtgcgccgcggcggggccaagcccccgcggcccgcgctggacgcccggccttccctctatgcgcaggtgcagaagccaccgaggcacgcgcctggggcacacggagggcccggggagatggcagccatgatcgaggtgaagaaggacgaggcggaccacgacggcgacggccccccctacgacacgctgcacatctacggctacgagggctccgagtccatagccgagtccctcagctccctgggcaccgactcatccgactctgacgtggattacgacttccttaacgactggggacccaggtttaagatgctggctgagctgtacggctcggacccccgggaggagctgctgtattaggcggccgaggtcactctgggcctggggacccaaaccccctgcagcccaggccagtcagacgccaggcaccacagcctccaaaaatggcagtgactccccagcccagcaccccttcctcgtgggtcccagagacctcatcagccttgggatagcaaactccaggttcctgaaatatccaggaatatatgtcagtgatgactattctcaaatgctggcaaatccaggctggtgttctgtctgggctcagacatccacataaccctgtcacccacagaccgccgtctaactcaaagacttcctctggctccccaaggctgcaaagcaaaacagactgtgtttaactgctgcagggtctttttctagggtccctgaacgccctggtaaggctggtgaggtcctggtgcctatctgcctggaggcaaaggcctggacagcttgacttgtggggcaggattctctgcagcccattcccaagggagactgaccatcatgccctctctcgggagccctagccctgctccaactccatactccactccaagtgccccaccactccccaacccctctccaggcctgtcaagagggaggaaggggccccatggcagctcctgaccttgggtcctgaagtgacctcactggcctgccatgccagtaactgtgctgtactgagcactgaaccacattcagggaaatggcttattaaactttgaagcaactgtgaattcattctggaggggcagtggagatcaggagtgacagatcacagggtgagggccacctccacacccaccccctctggagaaggcctggaagagctgagaccttgctttgagactcctcagcacccctccagttttgcctgagaaggggcagatgttcccggagcagaagacgtctccccttctctgcctcacctggtcgccaatccatgctctctttcttttctctgtctactccttatcccttggtttagaggaacccaagatgtggcctttagcaaaactggacaatgtccaaacccactcatgactgcatgacggagccgagccatgtgtctttacacctcgctgttgtcacatctcagggaactgaccctcaggcacaccttgcagaaggcaaggccctgccctgcccaacctctgtggtcacccatgcatcttccactggaacgtttcactgcaaacacaccttggagaagtggcatcagtcaacagagaggggcagggaaggagacaccaagctcacccttcgtcatggaccgaggttcccactctgggcaaagcccctcacactgcaagggattgtagataacactgacttgtttgttttaaccaataactagcttcttataatgatttttttactaatgatacttacaagtttctagctctcacagacatatagaataagggtttttgcataataagcaggttgttatttaggttaacaatattaattcaggttttttagttggaaaaacaattcctgtaaccttctattttctataattgtagtaattgctctacagataatgtctatatattggccaaactggtgcatgacaagtactgtatttttttatacctaaataaagaaaaatctttagcctgggcaacaaaaaaa

SEQ ID NO: 106 - protein, 784 aa, Homo sapiens
MQRLMMLLATSGACLGLLAVAAVAAAGANPAQRDTHSLLPTHRRQKRDWIWNQMHIDEEKNTSLPHHVGKIKSSVSRKNAKYLLKGEYVGKVFRVDAETGDVFAIERLDRENISEYHLTAVIVDKDTGENLETPSSFTIKVHDVNDNWPVFTHRLFNASVPESSAVGTSVISVTAVDADDPTVGDHASVMYQILKGKEYFAIDNSGRIITITKSLDREKQARYEIVVEARDAQGLRGDSGTATVLVTLQDINDNFPFFTQTKYTFVVPEDTRVGTSVGSLFVEDPDEPQNRMTKYSILRGDYQDAFTIETNPAHNEGIIKPMKPLDYEYIQQYSFIVEATDPTIDLRYMSPPAGNRAQVIINITDVDEPPIFQQPFYHFQLKENQKKPLIGTVLAMDPDAARHSIGYSIRRTSDKGQFFRVTKKGDIYNEKELDREVYPWYNLTVEAKELDSTGTPTGKESIVQVHIEVLDENDNAPEFAKPYQPKVCENAVHGQLVLQISAIDKDITPRNVKFKFILNTENNFTLTDNHDNTANITVKYGQFDREHTKVHFLPVVISDNGMPSRTGTSTLTVAVCKCNEQGEFTFCEDMAAQVGVSIQAVVAILLCILTITVITLLIFLRRRLRKQARAHGKSVPEIHEQLVTYDEEGGGEMDTTSYDVSVLNSVRRGGAKPPRPALDARPSLYAQVQKPPRHAPGAHGGPGEMAAMIEVKKDEADHDGDGPPYDTLHIYGYEGSESIAESLSSLGTDSSDSDVDYDFLNDWGPRFKMLAELYGSDPREELLY

SEQ ID NO: 107 - DNA, 3060 bp, Homo sapiens; identical to SEQ ID NO: 99

SEQ ID NO: 108 - protein, 731 aa, Homo sapiens; identical to SEQ ID NO: 100

SEQ ID NO: 109 - DNA, 2349 bp, Homo sapiens
gggagtgagaccgctctgcaaaccactgcgtgctttgcagagtgattatcagcacagttccctgccctggataaggaacagctacagtcgctgttaaatgtgcctgaaaagcaatttgcaatctttgcattaggatttcagatgcatgccaggtttccactgattgccagaactcgagatcactacacatggatccccaaaatcaacatggcagtggcagttcgttagttgtgatccagcagccttctttggatagccgtcagagattagactatgagagagagattcagcctactgctattttgtccttagaccagatcaaggccataagaggcagcaatgaatacacagaagggccttcggtggtgaaaagacctgctcctcggacagcaccaagacaagaaaagcatgaaaggactcatgaaatcataccaattaatgtgaataataactacgagcacagacacacaagccacctgggacatgcagtactcccaagtaatgccaggggccccattttgagcagatcaaccagcactggaagtgcagccagctctgggagcaacagcagtgcctcttctgaacagggactgttaggaaggtcaccaccaaccagaccagtccctggtcataggtctgaaagggcaatccggacccagcccaagcaactgattgtggatgacttgaagggttccttgaaagaggacctgacacagcacaagttcatttgtgaacagtgtgggaagtgcaagtgtggagaatgcactgctcccaggaccctaccatcctgtttggcctgtaaccggcagtgcctttgctctgctgagagcatggtggaatatggaacctgcatgtgcttagtcaagggcatcttctaccactgctccaatgacgacgaaggggattcctattcagataatccttgctcctgttcacaatcacactgctgctctagatacctgtgtatgggagccatgtctttatttttaccttgcttactctgttatcctcctgctaaaggatgcctgaagctgtgcaggaggtgttatgactggatccatcgcccagggtgcagatgtaagaactccaacactgtctattgtaagctggagagctgcccctcccggggtcagggtaaaccatcatgatttttggaggtgggttgtacctcctgaacttctagctttcaagttgtggctgttttttgtttttgtttttgtttttgttttctttagaatttttccctgtttcccaccttctcttcccctgttgccaaggtctaactcatggatttttctctttcctcatggatgatcttcagcaagagtggactgggaagctgcacctggctcccactttcaacaagagcctctgccatccacttgagggtattgagagccagtgggcttttgtgtagcctttttgttctgcaagcaactttctaaagttgtgtacatgaacatacacccacatccagactacagtgatttagagttgttttgattgggtaccgtgggagcagggaaattggttttttaaaaagcaactgtttaattgcttaaataaggtatgtattaaatctgtctccagttagggctatcttcctagcataggccccttaagtagcatgggggatatattttttgctataacgtaaaaattttcctttaaccactgccctctccttctttctccttcaaggttctttccccctcagttttgttgttgtcttactctggagatgccaagtgtattttttctttctatgtaattttagattcgccttacaatgtaaatcttcacattggagataatattggttggaccttgcccatcttcactctagccttcgtatttgtgaaggactcagccaccttccttcttcaccccatgcttctcaccaaatttttgttgtcattgagggcacttggataactcaagttgatatttatagctgatcaatctatatgtgtcacagaactatgctgcctaaagtgatcttggctccttaatggtccttttggccccttggatagttaacagttgagtaattctaatctcttctgtgttttccttgccttaaccacaaattgtggtgctttttgtatattttatgtataaatcacaaagttgaattctgactatttttaagacaaaagtctgttaaacttttttattgtaaagaatatttattatgcgaatctctattattttatggtatttattgcaaaagactgttgaaatgtactcatgtttgaatataacaaaatatcaatacttaacggaaaataaggtgacacgaagaaagtacatatgttaactataatgcagaaaatatattaattaatg

SEQ ID NO: 110 - protein, 319 aa, Homo sapiens
MDPQNQHGSGSSLVVIQQPSLDSRQRLDYEREIQPTAILSLDQIKAIRGSNEYTEGPSVVKRPAPRTAPRQEKHERTHEIIPINVNNNYEHRHTSHLGHAVLPSNARGPILSRSTSTGSAASSGSNSSASSEQGLLGRSPPTRPVPGHRSERAIRTQPKQLIVDDLKGSLKEDLTQHKFICEQCGKCKCGECTAPRTLPSCLACNRQCLCSAESMVEYGTCMCLVKGIFYHCSNDDEGDSYSDNPCSCSQSHCCSRYLCMGAMSLFLPCLLCYPPAKGCLKLCRRCYDWIHRPGCRCKNSNTVYCKLESCPSRGQGKPS

SEQ ID NO: 111 - DNA, 2317 bp, Homo sapiens
cggacgcgtgggtgagcagggacggtgcaccggacggcgggatcgagcaaatgggtctggccatggagcacggagggtcctacgctcgggcggggggcagctctcggggctgctggtattacctgcgctacttcttcctcttcgtctccctcatccaattcctcatcatcctggggctcgtgctcttcatggtctatggcaacgtgcacgtgagcacagagtccaacctgcaggccaccgagcgccgagccgagggcctatacagtcagctcctagggctcacggcctcccagtccaacttgaccaaggagctcaacttcaccacccgcgccaaggatgccatcatgcagatgtggctgaatgctcgccgcgacctggaccgcatcaatgccagcttccgccagtgccagggtgaccgggtcatctacacgaacaatcagaggtacatggctgccatcatcttgagtgagaagcaatgcagagatcaattcaaggacatgaacaagagctgcgatgccttgctcttcatgctgaatcagaaggtgaagacgctggaggtggagatagccaaggagaagaccatttgcactaaggataaggaaagcgtgctgctgaacaaacgcgtggcggaggaacagctggttgaatgcgtgaaaacccgggagctgcagcaccaagagcgccagctggccaaggagcaactgcaaaaggtgcaagccctctgcctgcccctggacaaggacaagtttgagatggaccttcgtaacctgtggagggactccattatcccacgcagcctggacaacctgggttacaacctctaccatcccctgggctcggaattggcctccatccgcagagcctgcgaccacatgcccagcctcatgagctccaaggtggaggagctggcccggagcctccgggcggatatcgaacgcgtggcccgcgagaactcagacctccaacgccagaagctggaagcccagcagggcctgcgggccagtcaggaggcgaaacagaaggtggagaaggaggctcaggcccgggaggccaagctccaagctgaatgctcccggcagacccagctagcgctggaggagaaggcggtgctgcggaaggaacgagacaacctggccaaggagctggaagagaagaagagggaggcggagcagctcaggatggagctggccatcagaaactcagccctggacacctgcatcaagaccaagtcgcagccgatgatgccagtgtcaaggcccatgggccctgtccccaacccccagcccatcgacccagctagcctggaggagttcaagaggaagatcctggagtcccagaggccccctgcaggcatccctgtagccccatccagtggctgaggaggctccaggcctgaggaccaagggatggcccgactcggcggtttgcggaggatgcagggatatgctcacagcgcccgacacaaccccctcccgccgcccccaaccacccagggccaccatcagacaactccctgcatgcaaacccctagtaccctctcacacccgcacccgcgcctcacgatccctcacccagagcacacggccgcggagatgacgtcacgcaagcaacggcgctgacgtcacatatcaccgtggtgatggcgtcacgtggccatgtagacgtcacgaagagatatagcgatggcgtcgtgcagatgcagcacgtcgcacacagacatggggaacttggcatgacgtcacaccgagatgcagcaacgacgtcacgggccatgtcgacgtcacacatattaatgtcacacagacgcggcgatggcatcacacagacggtgatgatgtcacacacagacacagtgacaacacacaccatgacaacgacacctatagatatggcaccaacatcacatgcacgcatgccctttcacacacactttctacccaattctcacctagtgtcacgttcccccgaccctggcacacgggccaaggtacccacaggatcccatcccctcccgcacagccctgggccccagcacctcccctcctccagcttcctggcctcccagccacttcctcacccccagtgcctggacccggaggtgagaacaggaagccattcacctccgctccttgagcgtgagtgtttccaggaccccctcggggccctgagccgggggtgagggtcacctgttgtcgggaggggagccactccttctcccccaactcccagccctgcctgtggcccgttgaaatgttggtggcacttaataaatattagtaaatccttaaaaaaaaaaaaaaaaaaaaaaaaaaaaaaa

SEQ ID NO: 112 - protein, 442 aa, Homo sapiens
MGLAMEHGGSYARAGGSSRGCWYYLRYFFLFVSLIQFLIILGLVLFMVYGNVHVSTESNLQATERRAEGLYSQLLGLTASQSNLTKELNFTTRAKDAIMQMWLNARRDLDRINASFRQCQGDRVIYTNNQRYMAAIILSEKQCRDQFKDMNKSCDALLFMLNQKVKTLEVEIAKEKTICTKDKESVLLNKRVAEEQLVECVKTRELQHQERQLAKEQLQKVQALCLPLDKDKFEMDLRNLWRDSIIPRSLDNLGYNLYHPLGSELASIRRACDHMPSLMSSKVEELARSLRADIERVARENSDLQRQKLEAQQGLRASQEAKQKVEKEAQAREAKLQAECSRQTQLALEEKAVLRKERDNLAKELEEKKREAEQLRMELAIRNSALDTCIKTKSQPMMPVSRPMGPVPNPQPIDPASLEEFKRKILESQRPPAGIPVAPSSG

SEQ ID NO: 113 - DNA, 7544 bp, Homo sapiens
gcggccgggccgggccgcgggagcaggcggaggcggaggcggcgggggcaggaggatgtcgcagccgccgctgctccccgcctcggcggagactcggaagttcacccgggcgctgagtaagccgggcacggcggccgagctgcggcagagcgtgtctgaggtggtgcgcggctccgtgctcctggcaaagccaaagctaattgagccactcgactatgaaaatgtcatcgtccagaagaagactcagatcctgaacgactgtttacgggagatgctgctcttcccttacgatgactttcagacggccatcctgagacgacagggtcgatacatatgctcaacagtgcctgcgaaggcggaagaggaagcacagagcttgtttgttacagagtgcatcaaaacctataactctgactggcatcttgtgaactataaatatgaagattactcaggagagtttcgacagcttccgaacaaagtggtcaagttggataaacttccagttcatgtctatgaagttgacgaggaggtcgacaaagatgaggatgctgcctcccttggttcccagaagggtgggatcaccaagcatggctggctgtacaaaggcaacatgaacagtgccatcagcgtgaccatgaggtcatttaagagacgatttttccacctgattcaacttggcgatggatcctataatttgaatttttataaagatgaaaagatctccaaagaaccaaaaggatcaatatttctggattcctgtatgggtgtcgttcagaacaacaaagtcaggcgttttgcttttgagctcaagatgcaggacaaaagtagttatctcttggcagcagacagtgaagtggaaatggaagaatggatcacaattctaaataagatcctccagctcaactttgaagctgcaatgcaagaaaagcgaaatggcgactctcacgaagatgatgaacaaagcaaattggaaggttctggttccggtttagatagctacctgccggaacttgccaagagtgcaagagaagcagaaatcaaactgaaaagtgaaagcagagtcaaacttttttatttggacccagatgcccagaagcttgacttctcatcagctgagccagaagtgaagtcatttgaagagaagtttggaaaaaggatccttgtcaagtgcaatgatttatctttcaatttgcaatgctgtgttgccgaaaatgaagaaggacccactacaaatgttgaacctttctttgttactctatccctgtttgacataaaatacaaccggaagatttctgccgatttccacgtagacctgaaccatttctcagtgaggcaaatgctcgccaccacgtccccggcgctgatgaatggcagtgggcagagcccatctgtcctcaagggcatccttcatgaagccgccatgcagtatccgaagcagggaatattttcagtcacttgtcctcatccagatatatttcttgtggccagaattgaaaaagtccttcaggggagcatcacacattgcgctgagccatatatgaaaagttcagactcttctaaggtggcccagaaggtgctgaagaatgccaagcaggcatgccaaagactaggacagtatagaatgccatttgcttgggcagcaaggacattgtttaaggatgcatctggaaatcttgacaaaaatgccagattttctgccatctacaggcaagacagcaataagctatccaatgatgacatgctcaagttacttgcagactttcggaaacctgagaagatggctaagctcccagtgattttaggcaatctagacattacaattgataatgtttcctcagacttccctaattatgttaattcatcatacattcccacaaaacaatttgaaacctgcagtaaaactcccatcacgtttgaagtggaggaatttgtgccctgcataccaaaacacactcagccttacaccatctacaccaatcacctttacgtttatcctaagtacttgaaatacgacagtcagaagtcttttgccaaggctagaaatattgcgatttgcattgaattcaaagattcagatgaggaagactctcagccccttaagtgcatttatggcagacctggtgggccagttttcacaagaagcgcctttgctgcagttttacaccatcaccaaaacccagaattttatgatgagattaaaatagagttgcccactcagctgcatgaaaagcaccacctgttgctcacattcttccatgtcagctgtgacaactcaagtaaaggaagcacgaagaagagggatgtcgttgaaacccaagttggctactcctggcttcccctcctgaaagacggaagggtggtgacaagcgagcagcacatcccggtctcggcgaaccttccttcgggctatcttggctaccaggagcttgggatgggcaggcattatggtccggaaattaaatgggtagatggaggcaagccactgctgaaaatttccactcatctggtttctacagtgtatactcaggatcagcatttacataattttttccagtactgtcagaaaaccgaatctggagcccaagccttaggaaacgaacttgtaaagtaccttaagagtctgcatgcgatggaaggccacgtgatgatcgccttcttgcccactatcctaaaccagctgttccgagtcctcaccagagccacacaggaagaagtcgcggttaacgtgactcgggtcattattcatgtggttgcccagtgccatgaggaaggattggagagccacttgaggtcatatgttaagtacgcgtataaggctgagccatatgttgcctctgaatacaagacagtgcatgaagaactgaccaaatccatgaccacgattctcaagccttctgccgatttcctcaccagcaacaaactactgaagtactcatggtttttctttgatgtactgatcaaatctatggctcagcatttgatagagaactccaaagttaagttgctgcgaaaccagagatttcctgcatcctatcatcatgcagtggaaaccgttgtaaatatgctgatgccacacatcactcagaagtttcgagataatccagaggcatctaagaacgcgaatcatagccttgctgtcttcatcaagagatgtttcaccttcatggacaggggctttgtcttcaagcagatcaacaactacattagctgttttgctcctggagacccaaagaccctctttgaatacaagtttgaatttctccgtgtagtgtgcaaccatgaacattatattccgttgaacttaccaatgccatttggaaaaggcaggattcaaagataccaagacctccagcttgactactcattaacagatgagttctgcagaaaccacttcttggtgggactgttactgagggaggtggggacagccctccaggagttccgggaggtccgtctgatcgccatcagtgtgctcaagaacctgctgataaagcattcttttgatgacagatatgcttcaaggagccatcaggcaaggatagccaccctctacctgcctctgtttggtctgctgattgaaaacgtccagcggatcaatgtgagggatgtgtcacccttccctgtgaacgcgggcatgactgtgaaggatgaatccctggctctaccagctgtgaatccgctggtgacgccgcagaagggaagcaccctggacaacagcctgcacaaggacctgctgggcgccatctccggcattgcttctccatatacaacctcaactccaaacatcaacagtgtgagaaatgctgattcgagaggatctctcataagcacagattcgggtaacagccttccagaaaggaatagtgagaagagcaattccctggataagcaccaacaaagtagcacattgggaaattccgtggttcgctgtgataaacttgaccagtctgagattaagagcctactgatgtgtttcctctacatcttaaagagcatgtctgatgatgctttgtttacatattggaacaaggcttcaacatctgaacttatggatttttttacaatatctgaagtctgcctgcaccagttccagtacatggggaagcgatacatagccagaacaggaatgatgcatgccagattgcagcagctgggcagcctggataactctctcacttttaaccacagctatggccactcggacgcagatgttctgcaccagtcattacttgaagccaacattgctactgaggtttgcctgacagctctggacacgctttctctatttacattggcgtttaagaaccagctcctggccgaccatggacataatcctctcatgaaaaaagtttttgatgtctacctgtgttttcttcaaaaacatcagtctgaaacggctttaaaaaatgtcttcactgccttaaggtccttaatttataagtttccctcaacattctatgaagggagagcggacatgtgtgcggctctgtgttacgagattctcaagtgctgtaactccaagctgagctccatcaggacggaggcctcccagctgctctacttcctgatgaggaacaactttgattacactggaaagaagtcctttgtccggacacatttgcaagtcatcatatctgtcagccagctgatagcagacgttgttggcattgggggaaccagattccagcagtccctgtccatcatcaacaactgtgccaacagtgaccggcttattaagcacaccagcttctcctctgatgtgaaggacttaaccaaaaggatacgcacggtgctaatggccaccgcccagatgaaggagcatgagaacgacccagagatgctggtggacctccagtacagcctggccaaatcctatgccagcacgcccgagctcaggaagacgtggctcgacagcatggccaggatccatgtcaaaaatggcgatctctcagaggcagcaatgtgctatgtccacgtaacagccctagtggcagaatatctcacacggaaagaagcagtccagtgggagccgccccttctcccccacagccatagcgcctgcctgaggaggagccggggaggcgtgtttagacaaggatgcaccgccttcagggtcattaccccaaacatcgacgaggaggcctccatgatggaagacgtggggatgcaggatgtccatttcaacgaggatgtgctgatggagctccttgagcagtgcgcagatggactctggaaagccgagcgctacgagctcatcgccgacatctacaaacttatcatccccatttatgagaagcggagggattttgagaggctggcccatctgtatgacacgctgcaccgggcctacagcaaagtgaccgaggtcatgcactcgggccgcaggcttctggggacctacttccgggtagccttcttcgggcaggcagcgcaataccagtttacagacagtgaaacagatgtggagggattctttgaagatgaagatggaaaggagtatatttacaaggaacccaaactcacaccgctgtcggaaatttctcagagactccttaaactgtactcggataaatttggttctgaaaatgtcaaaatgatacaggattctggcaaggtcaaccctaaggatctggattctaagtatgcatacatccaggtgactcacgtcatccccttctttgacgaaaaagagttgcaagaaaggaaaacagagtttgagagatcccacaacatccgccgcttcatgtttgagatgccatttacgcagaccgggaagaggcagggcggggtggaagagcagtgcaaacggcgcaccatcctgacagccatacactgcttcccttatgtgaagaagcgcatccctgtcatgtaccagcaccacactgacctgaaccccatcgaggtggccattgacgagatgagtaagaaggtggcggagctccggcagctgtgctcctcggccgaggtggacatgatcaaactgcagctcaaactccagggcagcgtgagtgttcaggtcaatgctggcccactagcatatgcgcgagctttcttagatgatacaaacacaaagcgatatcctgacaataaagtgaagctgcttaaggaagttttcaggcaatttgtggaagcttgcggtcaagccttagcggtaaacgaacgtctgattaaagaagaccagctcgagtatcaggaagaaatgaaagccaactacagggaaatggcgaaggagctttctgaaatcatgcatgagcagctgggatgatctgccccctggaggagaagacgagcgtcttaccgaattcccttcacatcttcaacgccatcagtgggactccaacaagcacaatggttcacgggatgaccagctcgtcttcggtcgtgtgattacatctcatggcccgtgtgtggggacttgctttgtcatttgcaaactcaggatgctttccaaagccaatcactggggagaccgagcacagggaggaccaaggggaaggggagagaaaggaaataaagaacaacgttatttcttaacagactttctataggagttgtaagaaggtgcacatatttttttaaatctcactggcaatattcaaagttttcattgtgtcttaacaaaggtgtggtagacactcttgagctggacttagattttattcttccttgcagagtagtgttagaatagatggcctacagaaaaaaaaggttctgggatctacatggcagggagggctgcactgacattgatgcctgggggaccttttgcctcgaggctgagctggaaaatcttgaaaatattttttttttcctgtggcacattcaggttgaatacaagaactatttttgtgactagtttttgatgacctaagggaactgaccattgtaatttttgtaccagtgaaccaggagatttagtgcttttatattcatttccttgcatttaagaaaatatgaaagcttaaggaattatgtgagcttaaaactagtcaagcagtttagaaccaaaggcctatattaataaccgcaactatgctgaaaagtacaaagtagtacagtatattgttatgtacatatcattgttaatacagtcctggcattctgtacatatatgtattacatttctacatttttaatactcacatgggcttatgcattaagtttaattgtgataaatttgtgctgttccagtatatgcaatacactttaatgttttattcttgtacataaaaatgtgcaatatggagatgtatacagtctttactatattaggtttataaacagttttaagaatttcatccttttgccaaaatggtggagtatgtaattggtaaatcataaatcctgtggtgaatggtggtgtactttaaagctgtcaccatgttatattttcttttaagactttaatttagtaattttatatttgggaaaataaaggtttttaattttatttaactggaatcactgccctgctgtaattaaacattctgtaccacatctgtattaaaaagacattgctgaccattaaaaaaaaaaaaaaaaaa

SEQ ID NO: 114 - protein, 1 aa, Homo sapiens
M

SEQ ID NO: 115 - DNA, 639 bp, Homo sapiens
atggattatttgctcatgattttctctctgctgtttgtggcttgccaaggagctccagaaacagcagtcttaggcgctgagctcagcgcggtgggtgagaacggcggggagaaacccactcccagtccaccctggcggctccgccggtccaagcgctgctcctgctcgtccctgatggataaagagtgtgtctacttctgccacctggacatcatttgggtcaacactcccgagcacgttgttccgtatggacttggaagccctaggtccaagagagccttggagaatttacttcccacaaaggcaacagaccgtgaaaatagatgccaatgtgctagccaaaaagacaagaagtgctggaatttttgccaagcaggaaaagaactcagggctgaagacattatggagaaagactggaataatcataagaaaggaaaagactgttccaagcttgggaaaaagtgtatttatcagcagttagtgagaggaagaaaaatcagaagaagttcagaggaacacctaagacaaaccaggtcggagaccatgagaaacagcgtcaaatcatcttttcatgatcccaagctgaaaggcaagccctccagagagcgttatgtgacccacaaccgagcacattggtga

SEQ ID NO: 116 - protein, 212 aa, Homo sapiens
MDYLLMIFSLLFVACQGAPETAVLGAELSAVGENGGEKPTPSPPWRLRRSKRCSCSSLMDKECVYFCHLDIIWVNTPEHVVPYGLGSPRSKRALENLLPTKATDRENRCQCASQKDKKCWNFCQAGKELRAEDIMEKDWNNHKKGKDCSKLGKKCIYQQLVRGRKIRRSSEEHLRQTRSETMRNSVKSSFHDPKLKGKPSRERYVTHNRAHW

SEQ ID NO: 117 - DNA, 5848 bp, Homo sapiens
atgccacagtagtgcctgtagcagagaaaggattccctcctccacctcagggcccactgctgctgctctccagcctgcagtttcctctaaggctctggattggctggaagagcaacagagggctgggaaagagcttctatatatacctcaggaggaaaggcatcccagacagttttgaagttttcaaagactggctctgctgttaagaagttgtacttaaagcggaggagctaagccacctgccaaaatgtgcaaaggacttgcagctttgccccactcatgcctggaaagggccaaggagattaagatcaagttgggaattctcctccagaagccagactcagttggtgaccttgtcattccgtacaatgagaagccagagaaaccagccaagacccagaaaacctcgctggacgaggccctgcagtggcgtgattccctggacaaactcctgcagaacaactatggacttgccagtttcaaaagtttcctgaagtctgaattcagtgaggaaaaccttgagttctggattgcctgtgaggattacaagaagatcaagtcccctgccaagatggctgagaaggcaaagcaaatttatgaagaattcattcaaacggaggctcctaaagaggtgaatattgaccacttcactaaggacatcacaatgaagaacctggtggaaccttccctgagcagctttgacatggcccagaaaagaatccatgccctgatggaaaaggattctctgcctcgctttgtgcgctctgagttttatcaggagttaatcaagtagtaatttagccaggctatgaaatcatcctgtgagttatttcctccataataaccctgcatttcccattaatctacatatcttcccacagcagctttgctcagtgatacccacatgggaaaaatcccaggggatgttgcttactctttttgcccacactgctttggatacttatctactgtccgaaggccttctttccccactcaattcttcctgccctgttattaattaagatatcttcagcttgtagtcagacacaatcagaatcacagaaaaatcctgcctaaggcaaagaaatataagacaagactatgatatcaatgaatgtgggttaagtaatagatttccagctaaattggtctaaaaaagaatattaagtgtggacagacctatttcaaaggagcttaattgatctcacttgttttagttctgatccagggagatcacccctctaattatttctgaacttggttaataaaagtttataagatttttatgaagcagccactgtatgatattttaagcaaatatgttatttaaaatattgatccttcccttggaccaccttcatgttagttgggtattataaataagagatacaaccatgaatatattatgtttatacaaaatcaatctgaacacaattcataaagatttctcttttataccttcctcactggccccctccacctgcccatagtcaccaaattctgttttaaatcaatgacctaagatcaacaatgaagtattttataaatgtatttatgctgctagactgtgggtcaaatgtttccattttcaaattatttagaattcttatgagtttaaaatttgtaaatttctaaatccaatcatgtaaaatgaaactgttgctccattggagtagtctcccacctaaatatcaagatggctatatgctaaaaagagaaaatatggtcaagtctaaaatggctaattgtcctatgatgctattatcatagactaatgacatttatcttcaaaacaccaaattgtctttagaaaaattaatgtgattacaggtagaggccttctaggtgagacacttttaaggtacactgcattttgcaaaaaaaaaaaaaaaaagtaatcttttagcaaccccagtattccttcactatttcgcttcctgcattagcaaattttacttacagtcaaaagtgcagatttatactcctgacgtgtctcattcacagctaaataataggccataggacttttggtaggtttaaacttttaattctgtatttcatgattataagtcttgctagaattttttctaatctttagtagatttgattaaataatgattcacagaatttagtaacagaatcaaactaagccatgtatgagggtaatcgagatgaggatattaactcaaaagaaatagggtgatttttaaaggattaataaaattctgaaatgttaagtagaagattacattgtctagtcttgtatttcctccttctgttgctctctttcattcacacactctcagtttctcatatttgtagctcatttatttggttatttcctaagaatattgaaagtgaagcaactatgtgactgtattcttcaggtaaacactgactgcgcttgttggattttccctatttttgtgacttcaagaataatatgccctgctgaatacatgccatttcacattctgaaactgggtagagtggttgggtgttctgccaacaattgctagtggtgtgaattcattcatatttgccagtattgctcacttcaaagaaactccttcatcaagcagtccagagctaggccagatcaatgctacaatcatgaagttctcattgcatgcaattgtgtaggattgacaaggaactcagataaaaatttccagggtgcacttccagaaccagcttcaacatatgtctacattgcccccaagttaataaagtgccaaccctttactctctcatacagccagaaatgttagaaatccaaaatcttggtgcattattttttcataaacgctaaaacatttgaagaaacaatttaattatttaaaattcaagtattttattcacattatttgcaatatccaaatgtttaaaaattcccagataattaactagctattacagatctcacctagagggttgatgttatgaagactccagtggactgtactcacaaattgactggacaccctatgaaagtgggtagacctctcagcggaaaataagaagggcttttacctacagggcaggacagggtcccatgagagcagttctgtggagatataaaaagaatggaagaaggaatgccttatagtgatattgtgacattatatctatatatctacatatatctatctatctatatctacatctatataatcttacatttaaaattgtattcctacacatattagaaactcttctaataaatgaagtaaaaaaattaaaaagaatacaaatattccagccccaaatgagaaatcaaacatattaaaattgttcaagaaaatttctttgaacacttctgaaagtttttggaaacttagaaaagagggaaaaaaatccagtgttactagtaatttccatggtaatacagataaaatacattcttttaattctgggaaattagaaaaagtggggtgatctttccaggaaaaacatgtgtaacatctgcttatcactccagctccctcctcctcctcctctccacgttcccttgagtaaatgtctgggaaagcatgaagcttgatgcaagaaccctgttgtactggcgttttcctcccctgtgaaaacgtaactactgttgggagtgaattgaggatgtagaaaggtggtggaaccaaattgtggtcaatggaaataggagaatatggttctcactcttgagaaaaaaacctaagattagcccaggtagttgcctgtaacttcagtttttctgcctgggtttgatatagtttagggttggggttagattaagatctaaattacatcaggacaaagagacagactattaactccacagttaattaaggacgtatgttccatgtttatttgttaaagcagtgtgaatagccttcaagcatgtgaataatcttccatcttccccgccacacatacacacacacactttttgtttctttcaggtagacaccttttaaaatgcagaactaactgaggcatttcagtaactttgctttcaaatcaataaagtcaaatgtatggaaacattttgtgccctactctccataccccgtgtactcaaattctctactgtatgaattatgctttaagtagaattcagtgccaaggagaacttggtgaaataaattattttaattttttttttatcctttacaaagccatggattttatttggttgatgtgtgctctgtacacaagccatttcaataggatggagctgttaattattttccaaagagtaatagacatgcaaaagtttcaataaaaactgggccattaacaaataaattaataaactaataagcattcccttctaggtttttgccaaactgcctatccaataacaaatttgagaatcgttgaaaaagctagttatatttcagagaaatgattttcattattgaaactgttctccctagcaggccattttccctttttcctgggagtttagcaagtttaggagagaatagtcatgaaaagaaagggaagaaaggggagaagggaagaggttaaaaagtaagtgctcagacctatgaacgtaatccctttgctagaaatatttaagagcagctcagcttggttgaaactgagttttgtcatcttccatatttgcaggaaggtattttctgacttgcaatgcagctagatgtaaaattttattttatcatcctagaaagccttgactagaaaaatgaataaatattgagggtttcctgtccatatctggcttgcatgtgccagaaagcagagaatagaaaatgtaatctccaacatccaagcatcgaaacccaaggggtaggcaattctatgtaggttttggacatgaagtttggtgcatcttggtttatgctggctcaactgctattaaacctctctggcttatagtctcttcattctattagacaagcacgtatcgaacacttgcttcgcacaaggctctttagttaacaatttagcagctactgtttgtgttaaacacacttttcaccaaataggttctgaggcaaacgagagcaatgactatttaaagaaaggctttcccagcatcacttacacatcccaaaactaaaaagatcaactcttccaactgagaaaagactcctggctttgaatggaaacttacagcagagagtcacaggccacggcaacaacaacgacaacaacaaacatttggaatattattctcaactcacgttttaataatacatcttattatttttctagtagagaaactacaaatcagcctcttcaacatttatatacagtttaataagcctcttgcaagttacttgttctctcacctgaggtatttttttcctccccaccttgcccctgttcctcccttcctcttctccctttgcaagaggaaatatttaacatatttgggtccaacttcaataatgtaataattaatacattaaaagcatttaacttcctttctagaaaaatgcacaggctaaggcatagacaaaacaaagagaaatgctgagaaatttgccactggagacaagcaatctgaataaatatttgccaaaagttctttttatgtcatatagtgtcaggatttgaaggagctatttttttttaatgttgcaactagcaactcatcttcggaagacacagccaggagaatgaagtagaagtgaaaggtttataaatccatttgtaagcatttatcccatatattttaaattcaagaaaaattgtgtttatctttagaattttgtattcaatactttatgtactatgtgactcatgcttctggataaataaagcaccaaatatgtatctgtaaccacaatcacacatattatattaaatatatatctataaaaaaaaaaaaaaaaaaaca

SEQ ID NO: 118 - protein, 181 aa, Homo sapiens
MCKGLAALPHSCLERAKEIKIKLGILLQKPDSVGDLVIPYNEKPEKPAKTQKTSLDEALQWRDSLDKLLQNNYGLASFKSFLKSEFSEENLEFWIACEDYKKIKSPAKMAEKAKQIYEEFIQTEAPKEVNIDHFTKDITMKNLVEPSLSSFDMAQKRIHALMEKDSLPRFVRSEFYQELIK

SEQ ID NO: 119 - DNA, 3960 bp, Homo sapiens
cacaggctgagcagtcaggcccacagcatctgaccccaggcccagctcgtcctggctggcctgggtcggcctctggagtatggtctggcgggtgccccctttcttgctccccatcctcttcttggcttctcatgtgggcgcggcggtggacctgacgctgctggccaacctgcggctcacggacccccagcgcttcttcctgacttgcgtgtctggggaggccggggcggggaggggctcggacgcctggggcccgcccctgctgctggagaaggacgaccgtatcgtgcgcaccccgcccgggccacccctgcgcctggcgcgcaacggttcgcaccaggtcacgcttcgcggcttctccaagccctcggacctcgtgggcgtcttctcctgcgtgggcggtgctggggcgcggcgcacgcgcgtcatctacgtgcacaacagccctggagcccacctgcttccagacaaggtcacacacactgtgaacaaaggtgacaccgctgtactttctgcacgtgtgcacaaggagaagcagacagacgtgatctggaagagcaacggatcctacttctacaccctggactggcatgaagcccaggatgggcggttcctgctgcagctcccaaatgtgcagccaccatcgagcggcatctacagtgccacttacctggaagccagccccctgggcagcgccttctttcggctcatcgtgcggggttgtggggctgggcgctgggggccaggctgtaccaaggagtgcccaggttgcctacatggaggtgtctgccacgaccatgacggcgaatgtgtatgcccccctggcttcactggcacccgctgtgaacaggcctgcagagagggccgttttgggcagagctgccaggagcagtgcccaggcatatcaggctgccggggcctcaccttctgcctcccagacccctatggctgctcttgtggatctggctggagaggaagccagtgccaagaagcttgtgcccctggtcattttggggctgattgccgactccagtgccagtgtcagaatggtggcacttgtgaccggttcagtggttgtgtctgcccctctgggtggcatggagtgcactgtgagaagtcagaccggatcccccagatcctcaacatggcctcagaactggagttcaacttagagacgatgccccggatcaactgtgcagctgcagggaaccccttccccgtgcggggcagcatagagctacgcaagccagacggcactgtgctcctgtccaccaaggccattgtggagccagagaagaccacagctgagttcgaggtgccccgcttggttcttgcggacagtgggttctgggagtgccgtgtgtccacatctggcggccaagacagccggcgcttcaaggtcaatgtgaaagtgccccccgtgcccctggctgcacctcggctcctgaccaagcagagccgccagcttgtggtctccccgctggtctcgttctctggggatggacccatctccactgtccgcctgcactaccggccccaggacagtaccatggactggtcgaccattgtggtggaccccagtgagaacgtgacgttaatgaacctgaggccaaagacaggatacagtgttcgtgtgcagctgagccggccaggggaaggaggagagggggcctgggggcctcccaccctcatgaccacagactgtcctgagcctttgttgcagccgtggttggagggctggcatgtggaaggcactgaccggctgcgagtgagctggtccttgcccttggtgcccgggccactggtgggcgacggtttcctgctgcgcctgtgggacgggacacgggggcaggagcggcgggagaacgtctcatccccccaggcccgcactgccctcctgacgggactcacgcctggcacccactaccagctggatgtgcagctctaccactgcaccctcctgggcccggcctcgccccctgcacacgtgcttctgccccccagtgggcctccagccccccgacacctccacgcccaggccctctcagactccgagatccagctgacatggaagcacccggaggctctgcctgggccaatatccaagtacgttgtggaggtgcaggtggctgggggtgcaggagacccactgtggatagacgtggacaggcctgaggagacaagcaccatcatccgtggcctcaacgccagcacgcgctacctcttccgcatgcgggccagcattcaggggctcggggactggagcaacacagtagaagagtccaccctgggcaacgggctgcaggctgagggcccagtccaagagagccgggcagctgaagagggcctggatcagcagctgatcctggcggtggtgggctccgtgtctgccacctgcctcaccatcctggccgcccttttaaccctggtgtgcatccgcagaagctgcctgcatcggagacgcaccttcacctaccagtcaggctcgggcgaggagaccatcctgcagttcagctcagggaccttgacacttacccggcggccaaaactgcagcccgagcccctgagctacccagtgctagagtgggaggacatcacctttgaggacctcatcggggaggggaacttcggccaggtcatccgggccatgatcaagaaggacgggctgaagatgaacgcagccatcaaaatgctgaaagagtatgcctctgaaaatgaccatcgtgactttgcgggagaactggaagttctgtgcaaattggggcatcaccccaacatcatcaacctcctgggggcctgtaagaaccgaggttacttgtatatcgctattgaatatgccccctacgggaacctgctagattttctgcggaaaagccgggtcctagagactgacccagcttttgctcgagagcatgggacagcctctacccttagctcccggcagctgctgcgtttcgccagtgatgcggccaatggcatgcagtacctgagtgagaagcagttcatccacagggacctggctgcccggaatgtgctggtcggagagaacctagcctccaagattgcagacttcggcctttctcggggagaggaggtttatgtgaagaagacgatggggcgtctccctgtgcgctggatggccattgagtccctgaactacagtgtctataccaccaagagtgatgtctggtcctttggagtccttctttgggagatagtgagccttggaggtacaccctactgtggcatgacctgtgccgagctctatgaaaagctgccccagggctaccgcatggagcagcctcgaaactgtgacgatgaagtgtacgagctgatgcgtcagtgctggcgggaccgtccctatgagcgacccccctttgcccagattgcgctacagctaggccgcatgctggaagccaggaaggcctatgtgaacatgtcgctgtttgagaacttcacttacgcgggcattgatgccacagctgaggaggcctgagctgccatccagccagaacgtggctctgctggccggagcaaactctgctgtctaacctgtgaccagtctgacccttacagcctctgacttaagctgcctcaaggaatttttttaacttaagggagaaaaaaagggatctggggatggggtgggcttaggggaactgggttcccatgctttgtaggtgtctcatagctatcctgggcatccttctttctagttcagctgccccacaggtgtgtttcccatcccactgctcccccaacacaaacccccactccagctccttcgcttaagccagcactcacaccactaacatgccctgttcagctactcccactcccggcctgtcattcagaaaaaaataaatgttctaataagctccaaaaaaaaaaaaaaaaaaaaaaaaaaaaaaaaaaaaaaaaaaaaaaaaaaaaaaaaaaaaaaaaaaaaaaaaaaaaaaa

SEQ ID NO: 120 - protein, 1138 aa, Homo sapiens
MVWRVPPFLLPILFLASHVGAAVDLTLLANLRLTDPQRFFLTCVSGEAGAGRGSDAWGPPLLLEKDDRIVRTPPGPPLRLARNGSHQVTLRGFSKPSDLVGVFSCVGGAGARRTRVIYVHNSPGAHLLPDKVTHTVNKGDTAVLSARVHKEKQTDVIWKSNGSYFYTLDWHEAQDGRFLLQLPNVQPPSSGIYSATYLEASPLGSAFFRLIVRGCGAGRWGPGCTKECPGCLHGGVCHDHDGECVCPPGFTGTRCEQACREGRFGQSCQEQCPGISGCRGLTFCLPDPYGCSCGSGWRGSQCQEACAPGHFGADCRLQCQCQNGGTCDRFSGCVCPSGWHGVHCEKSDRIPQILNMASELEFNLETMPRINCAAAGNPFPVRGSIELRKPDGTVLLSTKAIVEPEKTTAEFEVPRLVLADSGFWECRVSTSGGQDSRRFKVNVKVPPVPLAAPRLLTKQSRQLVVSPLVSFSGDGPISTVRLHYRPQDSTMDWSTIVVDPSENVTLMNLRPKTGYSVRVQLSRPGEGGEGAWGPPTLMTTDCPEPLLQPWLEGWHVEGTDRLRVSWSLPLVPGPLVGDGFLLRLWDGTRGQERRENVSSPQARTALLTGLTPGTHYQLDVQLYHCTLLGPASPPAHVLLPPSGPPAPRHLHAQALSDSEIQLTWKHPEALPGPISKYVVEVQVAGGAGDPLWIDVDRPEETSTIIRGLNASTRYLFRMRASIQGLGDWSNTVEESTLGNGLQAEGPVQESRAAEEGLDQQLILAVVGSVSATCLTILAALLTLVCIRRSCLHRRRTFTYQSGSGEETILQFSSGTLTLTRRPKLQPEPLSYPVLEWEDITFEDLIGEGNFGQVIRAMIKKDGLKMNAAIKMLKEYASENDHRDFAGELEVLCKLGHHPNIINLLGACKNRGYLYIAIEYAPYGNLLDFLRKSRVLETDPAFAREHGTASTLSSRQLLRFASDAANGMQYLSEKQFIHRDLAARNVLVGENLASKIADFGLSRGEEVYVKKTMGRLPVRWMAIESLNYSVYTTKSDVWSFGVLLWEIVSLGGTPYCGMTCAELYEKLPQGYRMEQPRNCDDEVYELMRQCWRDRPYERPPFAQIALQLGRMLEARKAYVNMSLFENFTYAGIDATAEEA

SEQ ID NO: 121 - DNA, 4195 bp, Homo sapiens
acttcctctctttgttgtcctcgtattttcttttcctcctgagatttaacttgaagacaacgtcactagcagtttctggagctacttgccaaggctgagtgtgagctgagcctgccccaccaccaagatgatcctgagcttgctgttcagccttgggggccccctgggctgggggctgctgggggcatgggcccaggcttccagtactagcctctctgatctgcagagctccaggacacctggggtctggaaggcagaggctgaggacaccggcaaggaccccgttggacgtaactggtgcccctacccaatgtccaagctggtcaccttactagctctttgcaaaacagagaaattcctcatccactcgcagcagccgtgtccgcagggagctccagactgccagaaagtcaaagtcatgtaccgcatggcccacaagccagtgtaccaggtcaagcagaaggtgctgacctctttggcctggaggtgctgccctggctacacgggccccaactgcgagcaccacgattccatggcaatccctgagcctgcagatcctggtgacagccaccaggaacctcaggatggaccagtcagcttcaaacctggccaccttgctgcagtgatcaatgaggttgaggtgcaacaggaacagcaggaacatctgctgggagatctccagaatgatgtgcaccgggtggcagacagcctgccaggcctgtggaaagccctgcctggtaacctcacagctgcagtgatggaagcaaatcaaacagggcacgagttccctgatagatccttggagcaggtgctgctaccccacgtggacaccttcctacaagtgcatttcagccccatctggaggagctttaaccaaagcctgcacagccttacccaggccataagaaacctgtctcttgacgtggaggccaaccgccaggccatctccagagtccaggacagtgccgtggccagggctgacttccaggagcttggtgccaaatttgaggccaaggtccaggagaacactcagagagtgggtcagctgcgacaggacgtggaggaccgcctgcacgcccagcactttaccctgcaccgctcgatctcagagctccaagccgatgtggacaccaaattgaagaggctgcacaaggctcaggaggccccagggaccaatggcagtctggtgttggcaacgcctggggctggggcaaggcctgagccggacagcctgcaggccaggctgggccagctgcagaggaacctctcagagctgcacatgaccacggcccgcagggaggaggagttgcagtacaccctggaggacatgagggccaccctgacccggcacgtggatgagatcaaggaactgtactccgaatcggacgagactttcgatcagattagcaaggtggagcggcaggtggaggagctgcaggtgaaccacacggcgctccgtgagctgcgcgtgatcctgatggagaagtctctgatcatggaggagaacaaggaggaggtggagcggcagctcctggagctcaacctcacgctgcagcacctgcagggtggccatgccgacctcatcaagtacgtgaaggactgcaattgccagaagctctatttagacctggacgtcatccgggagggccagagggacgccacgcgtgccctggaggagacccaggtgagcctggacgagcggcggcagctggacggctcctccctgcaggccctgcagaacgccgtggacgccgtgtcgctggccgtggacgcgcacaaagcggagggcgagcgggcgcgggcggccacgtcgcggctccggagccaagtgcaggcgctggatgacgaggtgggcgcgctgaaggcggccgcggccgaggcccgccacgaggtgcgccagctgcacagcgccttcgccgccctgctggaggacgcgctgcggcacgaggcggtgctggccgcgctcttcggggaggaggtgctggaggagatgtctgagcagacgccgggaccgctgcccctgagctacgagcagatccgcgtggccctgcaggacgccgctagcgggctgcaggagcaggcgctcggctgggacgagctggccgcccgagtgacggccctggagcaggcctcggagcccccgcggccggcagagcacctggagcccagccacgacgcgggccgcgaggaggccgccaccaccgccctggccgggctggcgcgggagctccagagcctgagcaacgacgtcaagaatgtcgggcggtgctgcgaggccgaggccggggccggggccgcctccctcaacgcctcccttcacggcctccacaacgcactcttcgccactcagcgcagcttggagcagcaccagcggctcttccacagcctctttgggaacttccaagggctcatggaagccaacgtcagcctggacctggggaagctgcagaccatgctgagcaggaaagggaagaagcagcagaaagacctggaagctccccggaagagggacaagaaggaagcggagcctttggtggacatacgggtcacagggcctgtgccaggtgccttgggcgcggcgctctgggaggcaggatcccctgtggccttctatgccagcttttcagaagggacggctgccctgcagacagtgaagttcaacaccacatacatcaacattggcagcagctacttccctgaacatggctacttccgagcccctgagcgtggtgtctacctgtttgcagtgagcgttgaatttggcccagggccaggcaccgggcagctggtgtttggaggtcaccatcggactccagtctgtaccactgggcaggggagtggaagcacagcaacggtctttgccatggctgagctgcagaagggtgagcgagtatggtttgagttaacccagggatcaataacaaagagaagcctgtcgggcactgcatttgggggcttcctgatgtttaagacctgaaccccagccccaatctgatcagacatcatggactcgcccagctctcctcggcctggggctctggccaaggatgggctggaggtcattcagttggtctgtctcttccctggaaaccttctgcaaagatggtgtggtgtacgtggcttccctgtaaccacatggggcttggccatttctccatgatgagaaggactggaatgcttctccgggcaggacatggtcctaggaagcctgaaccttggcttggcatgccttctcagacagcacggcctgggctccaactcttcaccacaccctgtattctacaacttctttggtgttttgctcctcctgtggttggaaacttctgtacaacactttaaacttttctcttgcttcctcttctcttctcccttatcgtatgatagaaagacattcttccccaggaggaatgtttaaaatggaggcaacattttggccaacattggaaagcactagagggcaatgggattaaaccaacctgcttggtctctattagtcagtaatgaagacgacagcctggccaaccaagggaaaggaaattagtatctttagtttcagtcattccttgtaggatatggtttagctgtgcccccacctaaaatatcatcttgaattgtaatccctataatccccacatcaagggagagatcaggtggaggtaattggatcttgggggcggttcccccatgctgttcttgtgatagttctcacgagatctgatgattttataagtttgatagttcctcctgtgttcattctccttcctgccaccttgtgaagatgccttggttcctcttcactgtctgccatgattgtaagtttcctgaggcctccccagccatgtggaacagtgagtcaattaaacctctttcctttataaattatccagtcttgggcaattcttgatagcagtgtgaaaatggactaatacacttgtgtttatctgtaatttaaatttcatgtctttttctccttgccttacatagggtaaagaccaagaaatgccaaacgtgaactaaaatatgtagggccttcaacttttttacttcctccagtatcttaggaccatcgtaattcttgttagcatctctaaccaggaggcagctgagggaggagggaaagaagactgtaaaaatccccctcactaatgatcaactttggaataaagtgatgcccttcaaaaaaaaaaaaaaaaaa

SEQ ID NO: 122 - protein, 949 aa, Homo sapiens
MILSLLFSLGGPLGWGLLGAWAQASSTSLSDLQSSRTPGVWKAEAEDTGKDPVGRNWCPYPMSKLVTLLALCKTEKFLIHSQQPCPQGAPDCQKVKVMYRMAHKPVYQVKQKVLTSLAWRCCPGYTGPNCEHHDSMAIPEPADPGDSHQEPQDGPVSFKPGHLAAVINEVEVQQEQQEHLLGDLQNDVHRVADSLPGLWKALPGNLTAAVMEANQTGHEFPDRSLEQVLLPHVDTFLQVHFSPIWRSFNQSLHSLTQAIRNLSLDVEANRQAISRVQDSAVARADFQELGAKFEAKVQENTQRVGQLRQDVEDRLHAQHFTLHRSISELQADVDTKLKRLHKAQEAPGTNGSLVLATPGAGARPEPDSLQARLGQLQRNLSELHMTTARREEELQYTLEDMRATLTRHVDEIKELYSESDETFDQISKVERQVEELQVNHTALRELRVILMEKSLIMEENKEEVERQLLELNLTLQHLQGGHADLIKYVKDCNCQKLYLDLDVIREGQRDATRALEETQVSLDERRQLDGSSLQALQNAVDAVSLAVDAHKAEGERARAATSRLRSQVQALDDEVGALKAAAAEARHEVRQLHSAFAALLEDALRHEAVLAALFGEEVLEEMSEQTPGPLPLSYEQIRVALQDAASGLQEQALGWDELAARVTALEQASEPPRPAEHLEPSHDAGREEAATTALAGLARELQSLSNDVKNVGRCCEAEAGAGAASLNASLHGLHNALFATQRSLEQHQRLFHSLFGNFQGLMEANVSLDLGKLQTMLSRKGKKQQKDLEAPRKRDKKEAEPLVDIRVTGPVPGALGAALWEAGSPVAFYASFSEGTAALQTVKFNTTYINIGSSYFPEHGYFRAPERGVYLFAVSVEFGPGPGTGQLVFGGHHRTPVCTTGQGSGSTATVFAMAELQKGERVWFELTQGSITKRSLSGTAFGGFLMFKT

SEQ ID NO: 123 - DNA, 4261 bp, Homo sapiens
agccctgcattcctcgctccaaggggcagacaggacaggctgaaaatagcaactggttccaaaaagataaaggggatgactccagcagagcacctcactcctttgaagagcacagaggaagatgtcagcccagtcccttcctgcagcaacaccccccacgcagaagccccctcggatcatccgcccccgccctccttctcgttccagggctgcccagtccccagggcctccccacaatggctcctctccacaagaactaccccgaaactccaatgatgcaccaaccccaatgtgcacccccatcttctgggagcccccagctgcatccctcaagccccctgctcttttgcccccctcagcttctagagccagcctcgactcccagacttccccagactcaccttccagcacccccacacctagtccagtgtcccggcgctccgcctccccagaacctgctccccggtctccagtccccccacccaagccgtctgggtcaccctgcacgcctctgctccccatggctggagtcctggctcagaatggctctgcctcagctcctggcactgtgcggaggctggctggcaggtttgaagggggtgctgaaggccgggctcaggatgcagatgccccggagccaggtctccaagcgagagcagatgtgaatggggagagagaagctcccctcaccgggagtgggtcccaggagaacggtgctccagatgctggcctggcctgccctccctgctgcccctgtgtctgccacaccacccggcctggcctggagctcagatgggtgcctgtggggggctatgaggaggtccccagggtcccccgtcgggcctccccgctgcggacctctcgctcccgcccccaccctccaagcatcggtcaccctgccgttgtcctcacatcctaccgctccactgctgagcgcaaactcctgccactcctcaagcctcccaaaccaactcgtgtcaggcaggatgccaccattttcggggaccccccacagccagatcttgatctgctttctgaagatggaatccaaacaggggacagtcctgatgaagctcctcagaatactcctccagcaactgtggaggggagggaagaggaggggctagaggtgctgaaggagcagaattgggagctgcccctgcaggatgaacctctgtaccagacctaccgagcagccgtgctgtcagaggagctgtggggggtgggtgaggatgggagtccttctccagcaaatgctggagatgcacccaccttcccacgaccccctggacctcgcaacaccctgtggcaggagcttccggctgtgcaagccagcggtcttctggataccctcagcccccaggagaggcgcatgcaggagagtcttttcgaggtggtgacgtccgaggcttcctacctgcgctccctgcggctgctgaccgacaccttcgtgctgagccaggcactccgggacacgctcaccccccgtgatcaccacacactcttctccaatgtgcagcgagtccagggagtcagcgagcggtttctagcaacgctcctgtcccgtgtgcgctcttccccccacatcagcgacttgtgtgatgtggtgcatgcccacgctgtggggcctttctcggtgtatgtggattatgtgcggaaccagcagtatcaggaggagacctacagccgcctcatggacaccaacgtgcgcttctccgccgagctgcgccggctgcagagcctccctaagtgtgagcggctcccgctgccgtccttcctgctactgcccttccagcgcatcacccggctgcgcatgctgctgcagaatatcctgcgccagacagaagaggggtccagccgtcaggagaatgcccagaaggccctgggtgctgtcagcaagatcatcgagcgttgcagcgctgaggtggggcgcatgaagcagactgaagagctgatccggctcacccaaaggctgcgcttccacaaagtcaaggccctgcccctggtctcctggtcacggcgcctggaattccagggagagctgactgagttagggtgccggagggggggcgtgctctttgcctcgcgcccccgcttcacccctctttgcctgctgctctttagcgacctgctgctcatcactcagcctaagagtgggcagcggttacaggttctggactatgcccatcgctccctggtccaggcccagcaggttccggatccatctggaccccctaccttccgcctctcccttctcagcaaccaccagggccgccccacccaccgactactccaagcttcttccctatcagacatgcagcgctggctgggagccttcccaaccccaggcccccttccctgctccccagacaccatctatgaggactgtgactgttcccaggaactgtgttcagagtcgtctgcacctgccaagactgaaggacggagtctggagtccagggctgcccccaaacacctgcacaagacccctgaaggttggctgaaggggcttcctggggccttccctgcccagctggtgtgtgaagtcacaggggaacacgaaaggaggaggcaccttcgccagaaccagaggcttctcgaggctgttggatcttcttcaggcacccccaatgcccccccaccctaatgcaggctgaggagggggcacatgttgggagacacctaccagtgtggcacggagagaacaaagcccattcatccattggattcactgtcagtggagatactacctctcgtggcaaccatagagatcgagcttcaggacagagcagccaatgaaaacggccgcctgaacccacagcaataagaatgaatgaggatgccttgaatgtgtggccaatggagacagaggcttagtgcagagcagccaatgggtactgagctggctgagcctatggccaatgagtattcctgctatgctcagggccaaggaagacaaatctaggtcatggcagttgaaaaagggcctcattggagataaagtcgtaggataaaattgggaacaggaatgagcaggaagccaatcagccaaagaaaatggtgatctggacccaagagaccagtagtcaccctgcttgtttctgcagcaatgactggtcctgtcttttgagtctgggaaatactagtttccattcctggatgcttcctgtgccctctcaagccagttcttctcttccagaagaattcagagtatgtgtctcagaaaatctgtgtgtgtacatgtgcatgtgtagatatgtgtgtatatgtatcaggaaaggcattctgctgactgtggtgtgtgtgtggtgattgtgctcctgacccacaaatgactgagtgctccatttcttcctttaccccccatttttcctattattcgctccaagaaagatgctaagtctgagctccagaagagactgtgctgggtgtggcttggcacccaggggatgagagccctgagctttgggtctcttggaggctagggttctgtggcagttgcagggcaatgttatggagcagccaacggcctggcagaggagcccaagggactgaagatggccagtagctgggtcctgaggcccctgaagtctgcagacccttctccttgccccaaacactggcctccataattcctgcctgcagatctcccaacttgaactataatccaccagccagcctcagccttgagctttggaaccacattagatcctgcatctgggtgaagaaacgggagctgtggaccacaggccagccagtgaacctcctgggctttcttgcctttgtcctgatcctctcacagaaacactgggccaaacagtggggagagattggagagcgggtgtggctgcccaaccccatccagagcatctgcttccagatgagccagtgcctcgcatgataccagaggaggcgagggacagagacagcaaggcagacagtggctggcaggggggcccaggcccgggacgaggcctccccttcagctcaggcacagcaacttgcccaggactgacactgtcaccctgactgcaggaggcacagggactccgggagactcagagggcgaagagcactggcatttggcatgtccatgacattggagactcccctagcagggtgcctgacgtgtggggaaccctcagtaaatagtggtgcatttgtaaaaaaaaaaaaaaaaaaaaaaaaaaaaaaaaaaaaaaaaaaaaaaaaaaaaaaaaaaaaaaaaaaaaaaaaaaaaaaaaaaaaaaaaaaaaaaaaa

SEQ ID NO: 124 - protein, 841 aa, Homo sapiens
MSAQSLPAATPPTQKPPRIIRPRPPSRSRAAQSPGPPHNGSSPQELPRNSNDAPTPMCTPIFWEPPAASLKPPALLPPSASRASLDSQTSPDSPSSTPTPSPVSRRSASPEPAPRSPVPPPKPSGSPCTPLLPMAGVLAQNGSASAPGTVRRLAGRFEGGAEGRAQDADAPEPGLQARADVNGEREAPLTGSGSQENGAPDAGLACPPCCPCVCHTTRPGLELRWVPVGGYEEVPRVPRRASPLRTSRSRPHPPSIGHPAVVLTSYRSTAERKLLPLLKPPKPTRVRQDATIFGDPPQPDLDLLSEDGIQTGDSPDEAPQNTPPATVEGREEEGLEVLKEQNWELPLQDEPLYQTYRAAVLSEELWGVGEDGSPSPANAGDAPTFPRPPGPRNTLWQELPAVQASGLLDTLSPQERRMQESLFEVVTSEASYLRSLRLLTDTFVLSQALRDTLTPRDHHTLFSNVQRVQGVSERFLATLLSRVRSSPHISDLCDVVHAHAVGPFSVYVDYVRNQQYQEETYSRLMDTNVRFSAELRRLQSLPKCERLPLPSFLLLPFQRITRLRMLLQNILRQTEEGSSRQENAQKALGAVSKIIERCSAEVGRMKQTEELIRLTQRLRFHKVKALPLVSWSRRLEFQGELTELGCRRGGVLFASRPRFTPLCLLLFSDLLLITQPKSGQRLQVLDYAHRSLVQAQQVPDPSGPPTFRLSLLSNHQGRPTHRLLQASSLSDMQRWLGAFPTPGPLPCSPDTIYEDCDCSQELCSESSAPAKTEGRSLESRAAPKHLHKTPEGWLKGLPGAFPAQLVCEVTGEHERRRHLRQNQRLLEAVGSSSGTPNAPPP

SEQ ID NO: 125 - DNA, 5848 bp, Homo sapiens; identical to SEQ ID NO: 117

SEQ ID NO: 126 - protein, 181 aa, Homo sapiens; identical to SEQ ID NO: 118

SEQ ID NO: 127 - DNA, 4992 bp, Homo sapiens
attcataaaaaagccattttcccaggcagtggttgcaacatcgccgcggaggtagcgagctgagctgacagcgcggagctggcgctgtggagcgcagggagccttgccggttcctccgaccggcgtctgcgagtacagcggcggctaacctgccccggcttcaggatttacacagacgtggggcgatgcttgtgaccctgcagctcctcaaaccagcctgtattgagcggtttgcagcctgatgctcagccccctccccacagggcccctagaagcctgtttctccgtacagtccaggacctccagccccatggagcccccgatcccacagagcgcccccttgactcccaactcagtcatggtccagccccttcttgacagccggatgtcccacagccggctccagcacccactcaccatcctacccattgaccaggtgaagaccagccatgtggagaatgactacatagacaaccctagcctggccctgaccaccggcccaaagcggacccggggcggggccccagagctggccccgacgcccgcccgctgtgaccaggatgtcacccaccattggatctccttcagcgggcgccccagctctgtgagcagcagcagcagcacatcctctgaccaacggctcttagaccacatggcaccaccacccgtggctgaccaggcctcaccaagggctgtgcgcatccagcccaaggtggtccactgccagccgctggacctcaagggcccggcggtcccacccgagctggacaagcacttcttgctgtgcgaggcctgtgggaagtgtaaatgcaaggagtgtgcatccccccggacgttgccttcctgctgggtctgcaaccaggagtgcctgtgctcagcccagactctggtcaactatggcacgtgcatgtgtttggtgcagggcatcttctaccactgcacgaatgaggacgatgagggctcctgcgctgaccacccctgctcctgctcccgctccaactgctgcgcccgctggtccttcatgggtgctctctccgtggtgctgccctgcctgctctgctacctgcctgccaccggctgcgtgaagctggcccagcgtggctacgaccgtctgcgccgccctggttgccgctgcaagcacacgaacagcgtcatctgcaaagcagccagcggggatgccaagaccagcaggcccgacaagcctttctgacagtttgtgtcgaagccccagtgctctgcctggaaacctggttctcttctgacatctaagaagactgcagcaaggtcagaggttttagcctcctgaggctgaccttgctagtctgcccactccctacccccagcttcggaaaatacagagaccaccaccacgtaccctgtattccccaaggtgatgaagaagcactttggggctttttttcagggtcctgaaactttgtgtcaaacagacaatgcaggggcagggtgtggtttggggggaaatttttctttttcagaagacagaacacagatgtggacacatatccggaaactgcagctgcttgaatgccttcccagcccctccttctccctccctccctccgcccccccccccttcctcttttccattgtctttggctctcacaggagctagctgcctgggaggaattgttaactgagtaccagggtacctttaaagaagacccttggagtcttctataccttcttctccttccccatctcactccaccccactttgtccctgatgtcttggggaaggtgtagaacaccctagcagttcctattgtatatacttgggagccactgagaacagaggacggccagtgagtccaagcctcgttcctccttctgcctccccggagccacaggatggatttaggagccactgctcagtgcacttctcccttccaactgcatcaactaactctcgggggtgttctgctcaccacaccgtccttcggttcttactgagtcacagactcgcctgcccactacgtgtcctgggttctctctactcagatcccttccagaaactttatatgggtagaggaagccagggcggcaaatgcgagaccaaatatcattttgccaatgagtctgaggctgtggtctctggatccagtcattatgtttttatagaataattaaaccggatgctaacggtgttttaaaaaataataataaaacaacttgtttccttttggccacccccaggaagggctgatttcaaaatctgggggcgagcaacctcaaggaacacaatttccctccctatcaacaagaggattttaacagcaaagaagagaggcagcacctcccattggcagaatgaccgctgagccaggctgggtttgggtttcttctcttctgattctgctgctcactgtcatagccttttgtgtatagtgatgtgtctgtatctttaatgtaaatagagagatgatgaaaaaagagtctattttagtgttaggaagccccagcaggggagtcggaagagcttggaagagctggggagagggtaggggaaaggtttttccaggggccactgggtttgagccctgcttctgtgcacagccacaccaccctctcccgacagccctcaaagacgtagcaactctttctctcaaggtgctaaaggactcagaaggtgcagcacgtccagtgggtaggtacttgttgcatgcaaaagctgtagtgtatctggtccttcctccccagcttttgtgtggggttcttgctttgtgtggtattttgttttcccctctaatgagagggcatggcctgagtcagaagagctaccccaggtgaaactggaagtgcatgaggcagagcgtccgtagcatttccagtttgttctgtataggaacagaggtgcctccgggaaggaggcagcgaggtaggtagctatgataggcacctaatgcttctcaaggacttattttttccttcttgaagactagtagtaacatcttatgatttagagtaagttgattgtaaccataggtatttattgattggaggaagggagggtcatattattttcggctttatttatgtaacatttgctagcttgtaaaaggcgaatgtgaaatattgcatctgcattttccaaggctgattcgtgtagctacccttgccacagttgtgacggatgtatggatgttcttgaacatttcagaaggagtggtagaaaaaaacacacattcagccaaccacttatatgaattgaatgtatcagaagtgtactgaagggactggagatggttttcctcagatgagggggccccaaaattgatagtgcacatctgcacgctttctgcgaggcctcagaacttcccagggcccctccctcaaattgtctccatgggaaacttgacccagtggcaagttgcactttggtgatcttggtggtctacacacccgttctgtggagagtcgatttacataagctgtgtatacacacacacacacacacacacacacccctaccccacactgactgtctaccgacaaagaccctatttcctggcaaacggcctcctgaaccctgactttttgtgtacatacttgtaaacacggatttttctgggttttggtttgctttttccttttttccccctgcccctgttctagcttgttcttcttggtttgctttcaacctgcttgatggatgtctgcagagtgctctctaagagtccacctcagtgcctcgtgtgctcagtggtcatgggaaaggagcgaaggaaccatccttggttctcccagcttggttgtgtagcaatccctcagcattgtttttctcagcttcttggcaaaaattaaaacaacaacaacaacaacaacaacaacaacaaacagaaggataaactggcttgcctgtggaccctccccggctctggggccagtcgagagccactgagggacccagcactcagagacacaacacacatgtgtagctgcttctggctgagtgtgtttcctgtcaccaatggcctgtttggctggacgatgcctcggcttgaccttttttgaaaagtgctggttagttcccgcccctggtaaacctggggtaggtgggggttctgtcttaactcgaggggcacctgggatccaggacgcttctagggggctctggctgcccgtgttaatgaaggacagcgcttccgcgagcaccctgggaactgggtcttgggtagcaaagccctcccagagaaaagattgggcacaactaaggctttcctgagcaggaagggggtgaagaccaatcccttcctttggtcctttggtacgcaccccctcagagctgagatggaagacatggctagttcttttcagccttgtggagcctgtcagtcgccatcatacctcgagtgaggcccagctagataatgacttgtccaagatggcacacgtggaaagttgatctgcaccagaacccggatgactgtcaccttgaagcatcctgttctccttctgtgctgtcccaggaagtgtctggcgggcgtgggcagcacagctctacactgtacgattcactagggcatcctgcgagcctcactagccttctggttcatgcctttgacaagcatttttgtgccccctctgcttactgtgacagtcgatgatgaatcttgcgttgccattttctgctgtgggtaactgcgtgcagtgtcttgccttgctttctcttcttactgtcccacagcttggtttcatgttacaaacagaaaagctcgaggctcccaccccgccacatcccaacttcatttccccctcactgtagcccatttccaccccaccacaaagttgccacaggttttctttgtatagaatatttattttgaagctctattttaatagtatttattttagaaagtctactattgtaagagttcttctgtttgtgaagaaaaaaacaagttaaaaactgaatgtactgatttagaaaatatatataaatatatattgttaaatatacacgggactgccgtt

SEQ ID NO: 128 - protein, 322 aa, Homo sapiens
MLSPLPTGPLEACFSVQSRTSSPMEPPIPQSAPLTPNSVMVQPLLDSRMSHSRLQHPLTILPIDQVKTSHVENDYIDNPSLALTTGPKRTRGGAPELAPTPARCDQDVTHHWISFSGRPSSVSSSSSTSSDQRLLDHMAPPPVADQASPRAVRIQPKVVHCQPLDLKGPAVPPELDKHFLLCEACGKCKCKECASPRTLPSCWVCNQECLCSAQTLVNYGTCMCLVQGIFYHCTNEDDEGSCADHPCSCSRSNCCARWSFMGALSVVLPCLLCYLPATGCVKLAQRGYDRLRRPGCRCKHTNSVICKAASGDAKTSRPDKPF

SEQ ID NO: 129 - DNA, 6055 bp, Homo sapiens
actgagtcccgggaccccgggagagcggtcaatgtgtggtcgctgcgtttcctctgcctgcgccgggcatcacttgcgcgccgcagaaagtccgtctggcagcctggatatcctctcctaccggcacccgcagacgcccctgcagccgcggtcggcgcccgggctccctagccctgtgcgctcaactgtcctgcgctgcggggtgccgcgagttccacctccgcgcctccttctctagacaggcgctgggagaaagaaccggctcccgagttctgggcatttcgcccggctcgaggtgcaggatgcagagcaaggtgctgctggccgtcgccctgtggctctgcgtggagacccgggccgcctctgtgggtttgcctagtgtttctcttgatctgcccaggctcagcatacaaaaagacatacttacaattaaggctaatacaactcttcaaattacttgcaggggacagagggacttggactggctttggcccaataatcagagtggcagtgagcaaagggtggaggtgactgagtgcagcgatggcctcttctgtaagacactcacaattccaaaagtgatcggaaatgacactggagcctacaagtgcttctaccgggaaactgacttggcctcggtcatttatgtctatgttcaagattacagatctccatttattgcttctgttagtgaccaacatggagtcgtgtacattactgagaacaaaaacaaaactgtggtgattccatgtctcgggtccatttcaaatctcaacgtgtcactttgtgcaagatacccagaaaagagatttgttcctgatggtaacagaatttcctgggacagcaagaagggctttactattcccagctacatgatcagctatgctggcatggtcttctgtgaagcaaaaattaatgatgaaagttaccagtctattatgtacatagttgtcgttgtagggtataggatttatgatgtggttctgagtccgtctcatggaattgaactatctgttggagaaaagcttgtcttaaattgtacagcaagaactgaactaaatgtggggattgacttcaactgggaatacccttcttcgaagcatcagcataagaaacttgtaaaccgagacctaaaaacccagtctgggagtgagatgaagaaatttttgagcaccttaactatagatggtgtaacccggagtgaccaaggattgtacacctgtgcagcatccagtgggctgatgaccaagaagaacagcacatttgtcagggtccatgaaaaaccttttgttgcttttggaagtggcatggaatctctggtggaagccacggtgggggagcgtgtcagaatccctgcgaagtaccttggttacccacccccagaaataaaatggtataaaaatggaataccccttgagtccaatcacacaattaaagcggggcatgtactgacgattatggaagtgagtgaaagagacacaggaaattacactgtcatccttaccaatcccatttcaaaggagaagcagagccatgtggtctctctggttgtgtatgtcccaccccagattggtgagaaatctctaatctctcctgtggattcctaccagtacggcaccactcaaacgctgacatgtacggtctatgccattcctcccccgcatcacatccactggtattggcagttggaggaagagtgcgccaacgagcccagccaagctgtctcagtgacaaacccatacccttgtgaagaatggagaagtgtggaggacttccagggaggaaataaaattgaagttaataaaaatcaatttgctctaattgaaggaaaaaacaaaactgtaagtacccttgttatccaagcggcaaatgtgtcagctttgtacaaatgtgaagcggtcaacaaagtcgggagaggagagagggtgatctccttccacgtgaccaggggtcctgaaattactttgcaacctgacatgcagcccactgagcaggagagcgtgtctttgtggtgcactgcagacagatctacgtttgagaacctcacatggtacaagcttggcccacagcctctgccaatccatgtgggagagttgcccacacctgtttgcaagaacttggatactctttggaaattgaatgccaccatgttctctaatagcacaaatgacattttgatcatggagcttaagaatgcatccttgcaggaccaaggagactatgtctgccttgctcaagacaggaagaccaagaaaagacattgcgtggtcaggcagctcacagtcctagagcgtgtggcacccacgatcacaggaaacctggagaatcagacgacaagtattggggaaagcatcgaagtctcatgcacggcatctgggaatccccctccacagatcatgtggtttaaagataatgagacccttgtagaagactcaggcattgtattgaaggatgggaaccggaacctcactatccgcagagtgaggaaggaggacgaaggcctctacacctgccaggcatgcagtgttcttggctgtgcaaaagtggaggcatttttcataatagaaggtgcccaggaaaagacgaacttggaaatcattattctagtaggcacggcggtgattgccatgttcttctggctacttcttgtcatcatcctacggaccgttaagcgggccaatggaggggaactgaagacaggctacttgtccatcgtcatggatccagatgaactcccattggatgaacattgtgaacgactgccttatgatgccagcaaatgggaattccccagagaccggctgaagctaggtaagcctcttggccgtggtgcctttggccaagtgattgaagcagatgcctttggaattgacaagacagcaacttgcaggacagtagcagtcaaaatgttgaaagaaggagcaacacacagtgagcatcgagctctcatgtctgaactcaagatcctcattcatattggtcaccatctcaatgtggtcaaccttctaggtgcctgtaccaagccaggagggccactcatggtgattgtggaattctgcaaatttggaaacctgtccacttacctgaggagcaagagaaatgaatttgtcccctacaagaccaaaggggcacgattccgtcaagggaaagactacgttggagcaatccctgtggatctgaaacggcgcttggacagcatcaccagtagccagagctcagccagctctggatttgtggaggagaagtccctcagtgatgtagaagaagaggaagctcctgaagatctgtataaggacttcctgaccttggagcatctcatctgttacagcttccaagtggctaagggcatggagttcttggcatcgcgaaagtgtatccacagggacctggcggcacgaaatatcctcttatcggagaagaacgtggttaaaatctgtgactttggcttggcccgggatatttataaagatccagattatgtcagaaaaggagatgctcgcctccctttgaaatggatggccccagaaacaatttttgacagagtgtacacaatccagagtgacgtctggtcttttggtgttttgctgtgggaaatattttccttaggtgcttctccatatcctggggtaaagattgatgaagaattttgtaggcgattgaaagaaggaactagaatgagggcccctgattatactacaccagaaatgtaccagaccatgctggactgctggcacggggagcccagtcagagacccacgttttcagagttggtggaacatttgggaaatctcttgcaagctaatgctcagcaggatggcaaagactacattgttcttccgatatcagagactttgagcatggaagaggattctggactctctctgcctacctcacctgtttcctgtatggaggaggaggaagtatgtgaccccaaattccattatgacaacacagcaggaatcagtcagtatctgcagaacagtaagcgaaagagccggcctgtgagtgtaaaaacatttgaagatatcccgttagaagaaccagaagtaaaagtaatcccagatgacaaccagacggacagtggtatggttcttgcctcagaagagctgaaaactttggaagacagaaccaaattatctccatcttttggtggaatggtgcccagcaaaagcagggagtctgtggcatctgaaggctcaaaccagacaagcggctaccagtccggatatcactccgatgacacagacaccaccgtgtactccagtgaggaagcagaacttttaaagctgatagagattggagtgcaaaccggtagcacagcccagattctccagcctgactcggggaccacactgagctctcctcctgtttaaaaggaagcatccacacccccaactcctggacatcacatgagaggtgctgctcagattttcaagtgttgttctttccaccagcaggaagtagccgcatttgattttcatttcgacaacagaaaaaggacctcggactgcagggagccagtcttctaggcatatcctggaagaggcttgtgacccaagaatgtgtctgtgtcttctcccagtgttgacctgatcctctttttcattcatttaaaaagcatttatcatgccccctgctgcgggtctcaccatgggtttagaacaaagacgttcaagaaatggccccatcctcaaagaagtagcagtacctggggagctgacacttctgtaaaactagaagataaaccaggcaatgtaagtgttcgaggtgttgaagatgggaaggatttgcagggctgagtctatccaagaggctttgtttaggacgtgggtcccaagccaagccttaagtgtggaattcggattgatagaaaggaagactaacgttaccttgctttggagagtactggagcctgcaaatgcattgtgtttgctctggtggaggtgggcatggggtctgttctgaaatgtaaagggttcagacggggtttctggttttagaaggttgcgtgttcttcgagttgggctaaagtagagttcgttgtgctgtttctgactcctaatgagagttccttccagaccgttacgtgtctcctggccaagccccaggaaggaaatgatgcagctctggctccttgtctcccaggctgatcctttattcagaataccacaaagaaaggacattcagctcaaggctccctgccgtgttgaagagttctgactgcacaaaccagcttctggtttcttctggaatgaataccctcatatctgtcctgatgtgatatgtctgagactgaatgcgggaggttcaatgtgaagctgtgtgtggtgtcaaagtttcaggaaggattttacccttttgttcttccccctgtccccaacccactctcaccccgcaacccatcagtattttagttatttggcctctactccagtaaacctgattgggtttgttcactctctgaatgattattagccagacttcaaaattattttatagcccaaattataacatctattgtattatttagacttttaacatatagagctatttctactgatttttgcccttgttctgtcctttttttcaaaaaagaaaatgtgttttttgtttggtaccatagtgtgaaatgctgggaacaatgactataagacatgctatggcacatatatttatagtctgtttatgtagaaacaaatgtaatatattaaagccttatatataatgaactttgtactattcacattttgtatcagtattatgtagcataacaaaggtcataatgctttcagcaattgatgtcattttattaaagaacattgaaaaacttgaaggaatccctttgcaaggttgcattactgtacccatcatttctaaaatggaagagggggtggctgggcacagtggccgacacctaaaaacccagcactttggggggccaaggtgggaggatcgcttgagcccaggagttcaagaccagtctggccaacatggtcagattccatctcaaagaaaaaaggtaaaaataaaataaaatggagaagaaggaatcaga

SEQ ID NO: 130 - protein, 1356 aa, Homo sapiens
MQSKVLLAVALWLCVETRAASVGLPSVSLDLPRLSIQKDILTIKANTTLQITCRGQRDLDWLWPNNQSGSEQRVEVTECSDGLFCKTLTIPKVIGNDTGAYKCFYRETDLASVIYVYVQDYRSPFIASVSDQHGVVYITENKNKTVVIPCLGSISNLNVSLCARYPEKRFVPDGNRISWDSKKGFTIPSYMISYAGMVFCEAKINDESYQSIMYIVVVVGYRIYDVVLSPSHGIELSVGEKLVLNCTARTELNVGIDFNWEYPSSKHQHKKLVNRDLKTQSGSEMKKFLSTLTIDGVTRSDQGLYTCAASSGLMTKKNSTFVRVHEKPFVAFGSGMESLVEATVGERVRIPAKYLGYPPPEIKWYKNGIPLESNHTIKAGHVLTIMEVSERDTGNYTVILTNPISKEKQSHVVSLVVYVPPQIGEKSLISPVDSYQYGTTQTLTCTVYAIPPPHHIHWYWQLEEECANEPSQAVSVTNPYPCEEWRSVEDFQGGNKIEVNKNQFALIEGKNKTVSTLVIQAANVSALYKCEAVNKVGRGERVISFHVTRGPEITLQPDMQPTEQESVSLWCTADRSTFENLTWYKLGPQPLPIHVGELPTPVCKNLDTLWKLNATMFSNSTNDILIMELKNASLQDQGDYVCLAQDRKTKKRHCVVRQLTVLERVAPTITGNLENQTTSIGESIEVSCTASGNPPPQIMWFKDNETLVEDSGIVLKDGNRNLTIRRVRKEDEGLYTCQACSVLGCAKVEAFFIIEGAQEKTNLEIIILVGTAVIAMFFWLLLVIILRTVKRANGGELKTGYLSIVMDPDELPLDEHCERLPYDASKWEFPRDRLKLGKPLGRGAFGQVIEADAFGIDKTATCRTVAVKMLKEGATHSEHRALMSELKILIHIGHHLNVVNLLGACTKPGGPLMVIVEFCKFGNLSTYLRSKRNEFVPYKTKGARFRQGKDYVGAIPVDLKRRLDSITSSQSSASSGFVEEKSLSDVEEEEAPEDLYKDFLTLEHLICYSFQVAKGMEFLASRKCIHRDLAARNILLSEKNVVKICDFGLARDIYKDPDYVRKGDARLPLKWMAPETIFDRVYTIQSDVWSFGVLLWEIFSLGASPYPGVKIDEEFCRRLKEGTRMRAPDYTTPEMYQTMLDCWHGEPSQRPTFSELVEHLGNLLQANAQQDGKDYIVLPISETLSMEEDSGLSLPTSPVSCMEEEEVCDPKFHYDNTAGISQYLQNSKRKSRPVSVKTFEDIPLEEPEVKVIPDDNQTDSGMVLASEELKTLEDRTKLSPSFGGMVPSKSRESVASEGSNQTSGYQSGYHSDDTDTTVYSSEEAELLKLIEIGVQTGSTAQILQPDSGTTLSSPPV

SEQ ID NO: 131 - DNA, 519 bp, homo sapiens
acattgctcaccaacacacagggtagaaaaccactagctcttcctggagagaacagaacatgcagcctccaccacgtccccagaaacagccgcagacttgagctcactacatcaagaacaccacaccgcgctccaaggaacagctacaagcacagagacagaggcatacagagacaaagagagaaagagacgcaacatggcagcagacactgctttttttattaaacattaaaaaaaaggtcaaaatccaagcaaacttgaacccgagaatgtacacagaagtaggaaacacagagaacagagctgtcccagccagccagcgagcgatgctcttttcggagaacgtttcatagacggaagtagattccatgggcctccaagacaataggatcctctctccattcctcgccatatgggttttgttttttaagtcatttggtttggggagggccttgttttttttctgttttgatatttttattttttctgcagtcaccggctgccaacataatctgcacc

SEQ ID NO: 132 - DNA, 493 bp, Homo sapiens
atatgcatctaacagtagagcccaaaatacatgaagcaaaaactgaaaggaaaggagaaacagataagtccataaaaagagttggaatattcaatacccctttttcaataatagagcacctagacagaagataaaccaggaaatagaagacttgaacaacattataaggcaaattgacctaaaagacatctatagaactttccacccaacatcagaatacatattcttctcgagtgcatatgaaacatctccaaaataggtcataagttaaagcataaaacaagccttaataaatataagtagactgaaatcatgcaaagcatgccctctgaccacatgggatgaagttagaaaacaatgaaaagttgggaaactcacaaatatgtggaaatcagacacacttgtaagtgactggctgggtgcagtagctcacgcctgaaatctcagcactttggtaggccgaagtgggaggattccttggatcccttgagac

SEQ ID NO: 133 - DNA, 461 bp, Homo sapiens
gtgtttgtgtccctgggtacttgagattagggagtggtgatgactcttaacgagcatgctgccttcaagcatctgtttaacaaagcacatcttgcaccacccttaatccattcaaccctgaggggacacagcacatgtttcagagagcacagggttgggggtaaggtcacagatcaacaggatcccaaggcagaagaatttttcttagtacagaacaaaatgaaaagtctcccatgtctacctctttctacacagacatggcaaccatccgatttctcaatcttttccccacctttcccccctttctattccacaaaaccgccattgtcatcatggcccgttctcaatgagctgttgagtacacctcccagacggggtggtggccgggcagatgggctcctcacttcccagtaggggcggctgggcagaggtgcccctcacctcctggacagggtggctgg

SEQ ID NO: 134 - DNA, 451 bp, Homo sapiens
  misc_feature (76)..(76): n is a, c, g, or t
  misc_feature (96)..(96): n is a, c, g, or t
  misc_feature (117)..(117): n is a, c, g, or t
  misc_feature (125)..(126): n is a, c, g, or t
  misc_feature (133)..(133): n is a, c, g, or t
  misc_feature (139)..(139): n is a, c, g, or t
  misc_feature (146)..(146): n is a, c, g, or t
  misc_feature (151)..(152): n is a, c, g, or t
  misc_feature (154)..(154): n is a, c, g, or t
  misc_feature (156)..(157): n is a, c, g, or t
  misc_feature (165)..(165): n is a, c, g, or t
  misc_feature (172)..(172): n is a, c, g, or t
  misc_feature (185)..(185): n is a, c, g, or t
  misc_feature (208)..(208): n is a, c, g, or t
  misc_feature (425)..(425): n is a, c, g, or t
ccacacctggccatcttaagcaattttaagctcacgtttattttaataaacttcagtagatccttaaaacttctgntaagttgtttaatttttaangtataattaagtaagtatttntaagtagnngcatttnattttngtttttnatttnngngnngggaagtntaagccntgatgaaactgcntggtggaccctgaccaccacccntgcagcacaagccccgcgtttaaaaattatagacccgtgctcacttcagcagcacatacactaaaattggaaccttatagagaagattagcatgacccctgtgcgaggatgacacacaaattcgtgaagcattccatatttttctgaaattgaggcagtaattaatagcctaccaaccaaaaaaagcccaggaccagatggattcacagccaaattntgccacaggtacaaagaggagctggt

SEQ ID NO: 135 - DNA, 569 bp, Homo sapiens
acccacaaacagctcactcttaaatagtcagtgggccgaagaggaaatcaaaagagaaataagaaaatacactaagaaatacattgagatgaatgaaaatgaagacatggcataccaaaatgtatgggataaagctcaagcaatgcttctagggaaatttatagctgttaatgcctacaataaaaagaaagctctcaaatcagtaatcgattcaccaccataagacactggaaaaagaaaagcatactaaacctgaagacagcaaaaggaaggatgtaatcaagattaaagcaaaagttaatgaaatagagactgggaaaaccagtgaaaccaaaagctggttctttggaaagatcaacaaaattgacaaacctttagctaaacatatcagggtaaaaagagaaaacattcaaattactggaattacaaatgtgctgggtgtggtggcacacacctgtaatcccaacacctgggtgtggtggctcacacctgtaatcccaaggtgggaggatcacttgaggctgggagtctgagaccagactgggcaatatgacaagacctcatctatc

SEQ ID NO: 136 - DNA, 441 bp, Homo sapiens
  misc_feature (354)..(401): n is a, c, g, or t
acggacctgcgagtcacacaactggtgacccacaccagcggctggagcaggaccctcttggggagaagagcatcctgcccgcagccagggcccctcatcaaagtcctcggtgttttttaaattatcagaactgcccaggaccacgtttcccaggccctgcccagctgggactcctcggtccttgcctcctagtttctcaggcctggccctctcaaggcccaggcaccccaggccggttggaggccccgacttccactctggagaaccgtccaccctggaaagaagagctcagattcctcttggctctcggagccgcagggagtgtgtcttcccgcgccaccctccaccccccgnnnnnnnnnnnnnnnnnnnnnnnnnnnnnnnnnnnnnnnnnnnnnnnngccaggggccaaggagctattttggggtctcgtttgccca

SEQ ID NO: 137 - DNA, 515 bp, Homo sapiens
ggtggctctcttccaataacatcacttgatgcaactgggaacctggtatttgccaatgcgggaggagcccccaacatcgtgactgcccctctgttcctgaaccctcagaacctctctctgctcaccagcaaccctgttagcttggtctctgccgccgcagcatctgcagggaactctgcacctgtagccagccttcacgccacctccacctctgctgagtccatccagaactctctcttcacagtggcctctgccagcggggctgcgtccaccaccaccaccgcctccaaggcacagtgagctgggcagagctgggctgccagaagcctttttcactctgcagtgtgattggactgccagccaggttaataaactgaaaaatgtgattggcttcctctcgccgtgttgtgagggcaaaggagagaagggagaaaaaaaaaaaaaaaaccacacacacccatacacaatataccagaaaaggaaggaaggatggagacggaacatttgcctaattt

SEQ ID NO: 138 - DNA, 256 bp, Homo sapiens
ttctcaaacatgacagagcgttccttttatcaatggcaaatcgagggaaacataccaatggttcccagtttttcataaagagtgttacaccgtgcgctccaaagtaccacaaagcctgctccacacctggatggggtgcatgtagtctttggactggttatttctggttttgaagtaatcgaacaaattgaaaatctgaagaccgatgctgcaagcagaccatatgcagatgtgcgagttattgactgtggagtac

SEQ ID NO: 139 - DNA, 601 bp, Homo sapiens
  misc_feature (40)..(55): n is a, c, g, or t
  misc_feature (93)..(94): n is a, c, g, or t
  misc_feature (97)..(97): n is a, c, g, or t
  misc_feature (191)..(191): n is a, c, g, or t
  misc_feature (196)..(196): n is a, c, g, or t
  misc_feature (348)..(348): n is a, c, g, or t
  misc_feature (460)..(460): n is a, c, g, or t
  misc_feature (543)..(543): n is a, c, g, or t
  misc_feature (558)..(558): n is a, c, g, or t
  misc_feature (565)..(567): n is a, c, g, or t
tggaggcagcgataccagagccacccggacgccgctgtgnnnnnnnnnnnnnnnnggccgggctgcccttcgctgccaggacacctgccccanngcnggcttggccgccatccgggacgcttccagaccacctgccagccatcacaaggggaacgcagaggcggaaaccttgcagcatttttatttaaaanaaaanaagaaaaaaaacacccaaccacacaaagaacaaaaccagtaacaaacacaaaggaattcagggtcgctttgcttgctctctgtgctccgtggaggcctccgtgtgccctcgttgccgtggggacccagctccatgcacgtcaacccagtccngcccagactagtggacagacctggtgtcaccagtttttcctagcatcagtccgaaccatgcgcccgccctgccccaactgtgtgctggtcctgctgtggccgaggggaccgngtgtgtttggctctttatgcccctcccgctgtggtcctggaactcttcaccagggagggagccctgcgggggccgcagctttntggagggagccgccngtgcttnnntcacctgctccctttcttgcgtctccctgtgatg

SEQ ID NO: 140 - DNA, 413 bp, Homo sapiens
ggacccaaacatcctactggtcccttcttcccagttttgagcaaagatgaaagcactgccctccagtggccatcagaactattaattttcaccaaggcagaaccctccatttcatacagttgtaaccctttatattttgactttaaactttcaaggaacaaagatgccagaactaaaggaacagaaaaaccaaaggatataggaagctcctcaaaggaccatctccaaggcctagatcctggtgagccaaataaaagcaaggaagtgggcggagagaaaatagtacgttcctcaggaggcagaatggacgcacctgcttcagggtctgcctgtagcggcctgaacaagcaggagcctgggggtagccatgggtctgagacagaagacacagggagaagccttcccagcaagaa

SEQ ID NO: 141 - DNA, 374 bp, Homo sapiens
cttccttgctgtgtctggatattgtcacatgaggacttgacatgcggattgtggcagcctctgtgaccaagagcggaagacaacagcagcatagaaacctcaaatgaaaaatctaacatctcaagctactaatttagccaaccttggcatcagctatctctggtcttagtatatgaggcgataagcccccactgttcaagttgggtgtctatcaattgctgcagaatagaagttaatgaggcttcctcctcctggatcccctactagaccctgacatgcccattcagtcacaggcagaaagggaagcacagggtaaggagacctggctgactgtgccagacgcagatcttacctgtcctgcttagaacactcaa

SEQ ID NO: 142 - DNA, 464 bp, Homo sapiens
  misc_feature (63)..(63): n is a, c, g, or t
  misc_feature (100)..(100): n is a, c, g, or t
  misc_feature (153)..(153): n is a, c, g, or t
  misc_feature (155)..(156): n is a, c, g, or t
  misc_feature (178)..(178): n is a, c, g, or t
  misc_feature (180)..(180): n is a, c, g, or t
  misc_feature (182)..(182): n is a, c, g, or t
  misc_feature (285)..(285): n is a, c, g, or t
gccccaactttgcagtaaggtggtagaaaatggaatatccagagagctgcaaaaagatttttntttaatgtaatgaatggggagtagttttgtgaacacnctcgtattcacctcttctttcctctgggaggcctgcctgccttcccctccccnannaaccttgatccctgtctgctgnananggcgcgattgcttctcttcctcttctgcccaagaccaagactctaggtctgatatcctttttagccacacacacacaccccccacacacgaagtcttcttaancttcttgaatttaccagttactctggacacttcttgccataaccccatttcacagacaaaggcttaggagggaaaaagaaccaaactgtttctgtgtttgtcatgttaatgatgtccatccccacacacccagttcccatccctgatgcttcttgtgcctgtatcttgaaccttcagaa

SEQ ID NO: 143 - DNA, 514 bp, Homo sapiens
gcaggtgttacagttgtccttgtggataaagaaaatattaacaacacaccaaagcattttagaaaggatgttgatgttgtttgtgttgatatgagcatagaacagaagttaccaagaaagcctaaaacagacaaatttcaggtacttgctaagtcacatgcacataaatcagaagccctgcacagtaaagttagggagaaaaagaataaaaagcatcagaggaaagctgcatcctgggagagccagcgggcaagggacaccctgcctcagtcagaatcccaccaggaggagtcctggctttctgtgggtccagggggtgaaattacagaactaccagcatctgctcataaaaacaagtctaagaaaaaaaagaaaaagtccagtaaccgggaatatgagacactggccatgcctgaaggatcgcaagcaggcagagaggccgggactgatatgcaggaatcccagcctactgtgggcttggatgatgaaactccacaactactaggacctactc

SEQ ID NO: 144 - DNA, 116 bp, Homo sapiens
aagctttatttccatttggtccaaggcttgttaggatagttaagaaagctgcctattggctggagggagaggcttaggcagaagccctattactttgcaaggggcccttctgtcgt

SEQ ID NO: 145 - DNA, 524 bp, Homo sapiens
  misc_feature (81)..(81): n is a, c, g, or t
  misc_feature (390)..(390): n is a, c, g, or t
gatcacaaagccacttatgatactaaacggccaaatgaagagacaaaatctgtagataaaaatccttgtaaggatcgtganaagcatgtattagaagcaaggaacaataaagagtcaagtggcaataaactactttatatacttaacccaccagagacacaggttgaaaaagagcaaattactgggcaaattgacaagagtactgtcaagcctaaaccccagttaagtcattcctctagactttcctctgacttaactagagaaactgatgaagctgcttttgaaccagactataatgaaagtgacagtgaaagtaatgtttctgtaaaagaagaggaatcttcaggaaacatttctaaggacctgaaagataaaatagtggagaaagcnaaagagagcctggacacagcagcagttgtccaggtgggcataagcaggaatcagagccacagcagccccagcgtcagccccagcagaagccacagtccttctggaagccagacccgaagccacagtagcagtgc

SEQ ID NO: 146 - DNA, 409 bp, Homo sapiens
agattctgggtctcagtactgggaaagggtgaggctgaggctgcctgctgtcctgggggcctcaccctgccaccaacaggaagccacacagagggaagcagaaatgagacgcagccagtgagggcagggtacaaaggtgagatcccggagagacagatgctgggacatcatccttgggtactggttccaacagtgcctgcagatggagccaccctcggagagtccacaacagcagccaatccattctatgcgtgtctgagctactttaagtcgggtttttgactgtttgaatgagagtctcatcttggctaggcaccatggcgcaacaactggggaggtggaggtaggaagattgcttgaggccaggagtcccagagcagcctgggcaacctatcaagacgctgtcttt

SEQ ID NO: 147 - DNA, 513 bp, Homo sapiens
cattcttttcagctgcacatggtacatactcttaaaatcgaccacaattgctttattggccagaaagcaattctcaacaaattcaagaaacctgaaataccggccaggtgtagtggctcacacctgtaatcccaacactttggaaggctgaggtgggcaaatcacttgaggtcaagagtttgagaccagcctggccaacatggcaaaaacccatctcttctaaaaaatataaaaattagccgtgcatggtggcatgcgcctgtaatcccagctacttcggaggttgagtcacgagaattgcttgaacctgggaggaggaggttgcagtgagctgagatcacgccattgcactccagtctggttgacagagtgagactcatctcaaaaaaacaaaaaaaccctgaaataccaaccacactcttggaccacagtgccataaaaataaataccaagaagatctctcaaaaccatataattaagtggaaattaatctactcctgaatgacttgggta

SEQ ID NO: 148 - DNA, 403 bp, Homo sapiens
taaccaagaattccatatcctgccaaactaagctacatgagcaaagaagaaataaaatctttcccagacaagcaactgctaaaagaatttgttatcaccagactggccctacaagagagtcttgagagttctaaacatggaaatgaaagaatggtgacacctgctaccacaaaaatacacataagcacatagcccacagaccctgtaaagcaactacacaatccaaactacagagcaaccagctaatgacaccatgttaggaataaagcctcatgtctcaatattaaccttgaatgtaaacaacctaaacaccccacctaaaagacttggagtggcaaattggattaaaaacaagacccagccttctgctgtcttcaagagacctctctcacatgtaacagga

SEQ ID NO: 149 - DNA, 358 bp, Homo sapiens
tgggaggcatctcccagtaggggggcgactggcacttcataaggctgggtgcccctctgagatgaagcttccagaggaaggattaggcagcaacatgagctccttgccagcagcggaacaaagctgtatggagaatgactttgacgagtcgagagaaggcggcttcagacaatcggtaataacaaacttctcccagctaaaggaggatgtttgaacccatcacaaagaagcttaaaaacctttagaaaagagtagacaaatggctaacgagaataaacagcatagataagtccataaatgacctgatggagctgaaaaccatggcacaagaactacgtgatgcatgcacaagcttcag

SEQ ID NO: 150 - DNA, 526 bp, Homo sapiens
ggacagccgctgtactgtgttaaggaaacaagatagtggtgaagcaccgtttagttcaaccaaggtgaaaaacaaaagcaagaaaaagaagccaaaggattcaaagcctatgttagttgggtctggaacaacttcagtaacttcaaataatgagatcatcacttcaagtgaagaccatagcaatcgaaattcagattctgcaggcccatttgcagtgcctgaccatcttcggcaagatgtagaagaattcgaagctctctatgaccaacacagtaacgaatatgttgtccgcaataagaagctatgggacatgaacccaaaacaaaaatgttcaactctatatgattacttctctcagtttttggaggaacatggtcccttggacatgagtaacaagatgttctctgcagaatatgagtttttcccagaagaaactcgacagatactagaaaaagcaggaggtttaaaaccttttctcttgggatgccctcgttttgttgtgattgacaactgtattgcactgaag

SEQ ID NO: 151 - DNA, 556 bp, Homo sapiens
tgaaaagtctcccatgtctacttctttctacacagacacggcaaccatccgatttctcaatcttttccccacctttcccccttttctattccacaaaaccgccattgtcatcatggcccgttctcaatgagctgttgggtacacctcccagacggggtggtggccgggcagaggggctcctcacttcccagtaggggcggccgggcagaggcgcccctcacctcctggacggggcggctggccgggcggggggctgacccccctacctccctcccagacagggcggctggccaggcagaggggctcctcacctcccagacggggcggcggggcagaggcgctcccatctcagacgatgggcggccgggcagagacgctcctcacttcctagatgggatggcggccgggcagagacactcctcactttccagactgggcagccaggcagaggggctcctcacatcccagacgatgggcggccaggcagagacgctcctcacttcccagacggggtagcggccgggcagaggctgcaatctcggcactttggggggcc

SEQ ID NO: 152 - DNA, 512 bp, Homo sapiens
  misc_feature (136)..(136): n is a, c, g, or t
  misc_feature (180)..(181): n is a, c, g, or t
  misc_feature (189)..(249): n is a, c, g, or t
  misc_feature (253)..(254): n is a, c, g, or t
  misc_feature (256)..(325): n is a, c, g, or t
tgctgtgccccgagcactcacgggaccccaaagtgccagctgacgaggtatgcgggtgcccccttgtacgtgatgtctttgagctcacgggtgacttctgccgcctgcccaagcgccagtgcaatcgccattactnctgggagaagctgcggcgtgcggaagtggacttggagcgcgtgnngtgtgtgnnnnnnnnnnnnnnnnnnnnnnnnnnnnnnnnnnnnnnnnnnnnnnnnnnnnnnnnnnnnngcgnngnnnnnnnnnnnnnnnnnnnnnnnnnnnnnnnnnnnnnnnnnnnnnnnnnnnnnnnnnnnnnnnnnnnnnncgaccgctgagcctcctggcccggaccccttacaccctgcattccagatgggggagccgcccggtgcccgtgtgtccgttcctccactcatctgtttctccggttctccctgtgcccatccaccggttgaccgcccatctgcctttatcagagggactgtccccgtcgacatgttcagtgcctggtg

SEQ ID NO: 153 - DNA, 405 bp, Homo sapiens
ccgccgcagtactgtactcgaggtacgttcctatgcaaccgagagccccggcaaatacttcatgagcttagcagcctgggctcgagcagctatgcaaacgcgcttttcatttggagcacggggctgatgtgaagataagaattgtttctcctggagaaagatccatcatttctccagcttccaagcccccggcacctctgctcagctcccagatgtgacgagcacctcccgccagggggagtcaggggttgatcaaaccagctcttgtgacccaaaccagtgccgctgcattaaagggaggcccagctactccttcccagctgagatgtgggtacaggtcagatttgtcagggagatggcactaacacgacacaagctcactcccagaaccgcagctgatgttta

SEQ ID NO: 154 - DNA, 440 bp, Homo sapiens
ggcttaggcctcaaatggcttcttctaaaaactatggctctccactcatcagtggttccactccaaagcatgagcgtggctctcccagccatagtaagtcaccagcatataccccccagaatctggacagtgaaagtgagtcaggctcctccatagcagagaaatcttatcagaatagtcccagctcagacgatggtatccgaccacttccagaatacagcacagagaaacataagaagcacaaaaaggaaaagaagaaagtaaaagacaaagatagggaccgagaccgggacaaagaccgagacaagaaaaaatctcatagcatcaagccagagagttggtccaaatcacccatctcttcagaccagtccttgtctatgacaagtaacacaatcttatctgcagacagaccctcaaggctcagcccagactttatgatt

SEQ ID NO: 155 - DNA, 420 bp, Homo sapiens
tctgggacatcatgcgttgctgggagaaggaatgtccggtgaaacgggagcgactatcagagactagcccagcgttccgcattctcagtgtggagcccaggctgcaggccaacttcaccatccgggaagatgccaaccccagctcccgacagcgaggactcaagcgcttccaggctaacccggaggccaactggggtccccggcctcgtgcccggccagggggcaaggcggccgacgaagctatggaggagagacgcaggctgcttcagaacaagcggaaggagccgccggaagatgtggcccagcgggctgcccggctcaagacatttccttgcaagaggtttaaggagggcacctgtcaacgcggggaccagtgctgctactcccacagccccccgacacccagggtttctgctgatg

SEQ ID NO: 156 - DNA, 503 bp, Homo sapiens
ggtactggtagttaactctcaaggagaaatttcacggttgagcaccaaaaaggaagtgatcatgaaaggaaatatcaacaattattttaaattgggtcaagaagggaagtatcgcgtctaccacaatcaatactccaccaattcatttgctttgaataagcaccagcacagagaagaccatgataagagaaggcatcttgcacataagttctgtctgactccagcaggagagttcaaatggaacggttctgtccatgggtccaaagttcttaccatatctactctgagactgactatcacccaattagaaacaacatcccttcatccttccttcatcccaactgggcatcacatagggcaaattggatcaaggcagttcagatgtgtagcaaacccagagaatttgcattggctttagccattttggagtgtgcagttaaaccagttgtgatgctaccaatatggcgagaatctttaggacataccaggttacaccggatgac

SEQ ID NO: 157 - DNA, 537 bp, Homo sapiens
gagacgccgctgaaagtggccaactcccccacgatggtgaacctcctgttaggcaaaggcacttacacttccagcgaggagagctcgacggagagctcagaagaggaagacgcaccatccttcgcaccttccagttcagtcgacggcaacaacacggactccgagttcgaaaaaggctcaagcacaaggccaagaacccagagccacagaaggccacggcccccgtcaaggacgagtatgagtttgatgaggacgacgagcaggacagggttcctccggtggacgacaagcacctattgaaaaaggactacagaaaagaaacgaaatccaatagttttatctctatacccaaaatggaggttaaaagttacactaaaaataacacgattgcaccaaagaaagcgtcccatcgtatcctgtcagacacgtcggacgaggaggacgcgagtgtcaccgtggggacaggagagaagctgagactctcggcacatacgatattgcctggtagtaagacacgagagccttctaatgccaagc

SEQ ID NO: 158 - DNA, 524 bp, Homo sapiens
  misc_feature (80)..(80): n is a, c, g, or t
  misc_feature (85)..(85): n is a, c, g, or t
  misc_feature (87)..(87): n is a, c, g, or t
  misc_feature (226)..(226): n is a, c, g, or t
tcttcccacctttagagttgtttagacaaggaggagtaagcaaggaacttgttctgctttctatcgtggtcacattggtnatgcncnggacctgccagggtcagaatttatggatatctgaaccctgaccccgttcattctctcagtccacttccaatccacatcagtttgttgtctgccttggagagaagagccaaaactggggtgggcgggtgggtggggagtncaggatataaatgtgtaagtttttgttttttaaggtttttttcttagtgaattattcacccacagacatgagagaaaaaaagagggagggtgtgtggagaaaaaatgtttacagggctaacaagggatgatgtgtcatttagtatgttactaaaaagtgtggaaatgacttgattttaaggggagggtgaggccgaagagggaagcccaaagcagatcttaatgtttcaaaggagtgcagcccttcacagccatcagatatgagggcactgttctgtctggtgttgtagccatctcaa

SEQ ID NO: 159 - DNA, 549 bp, Homo sapiens
aaagagctgggtctggctgagcaccagctgcgcttcacctgccgcgtgcacctgcatgacacacgcaaggagcaggagacggcattgcgcgtctacagccacctcaagagcgtcctgaaggaccactgtgtgcagcacctcccagacggctctgtgactgtggagtccgtcctcctccaggccgccgccccttctgaggacccaggcaccaaggtgctgctggtctcctggacctaccaggacgaggagctggggagcttctcacatctctgctgaagaagggcctcccccaggcccccagctgaggccggcaactcacccagccgccacctctgccctctcccagccggacagaccctgggcctgcacttcaggactgtgggtgccctgggtgaacagaccctgcaggtcccatccctggggacggaggccttgtgtcacctgcctgcccaggcagctgtttgcagctgaagaaacaaactggtctccaggctgtcttgcctttattcctggttagggcaggtggtcctagacagcagtttccagtaa

SEQ ID NO: 160 - DNA, 534 bp, Homo sapiens
agaacgctgtgaagacggatgcccctgcctctgccctctgggacatcatgcgttgctgggagaaggaatgtccggtgaaacgggagcgactatcagagactagcccagcgttccgcattctcagtgtggagcccaggctgcaggccaacttcaccatccgggaagatgccaaccccagctcccgacagcgaggactcaagcgcttccaggctaacccggaggccaactggggtccccggcctcgtgcccggccagggggcaaggcggccgacgaagctatggaggagagacgcaggctgcttcagaacaagcggaaggagccgccggaagatgtggcccagcgggctgcccggctcaagacatttccttgcaagaggtttaaggagggcacctgtcaacgcggggaccagtgctgctactcccacagccccccgacacccagggtttctgctgatgctgcccctgactgtccagagacctccaaccagaccccccctggacctggggctgccgctgggccaggcatagactgaa

SEQ ID NO: 161 - DNA, 517 bp, Homo sapiens
  misc_feature (77)..(77): n is a, c, g, or t
gtttctgggtccttgaaatcacctgttcccagatcagatattccagagcctgaaagggaacaaaaacgccgcaaaantgatactcacccttctccatcacattcctccacagtaaaggacagtctcatcgaactcaaggaatcttcagcaaagctctacattaatcatactcctccaccactgtccaagagtaaggagagagaaatggacaagaaagatttggacaagtcaagggaaagatccagagaaagagagaaaaaagatgaaaaggacaggaaagagcggaaaagggatcactcaaacaacgaccgtgaagtgccaccggacttaaccaagagacgtaaagaggagaatggaacaatgggggtttcaaaacataaaagtgaaagtccttgtgaatctccttatccaaatgagaaagacaaggaaaaaaataagtcaaaatcttcaggcaaagaaaaaggcagtgattcatttaaatctgagaagatggataaaatctcctccggtggcaaaa

SEQ ID NO: 162 - DNA, 475 bp, Homo sapiens
aaggtcagttgattccagtgctaaaagggaaaaacctgtggtccgcccagaagagattcctccagtgcctgagaaccgatttttactgagaagagatatgcctgttgttactgcagaacctgaaccgaagattcctgatgttgcacccattgtaagtgatcagaaaccatctgtatcaaagtctggacggaagattaaaggaaggggcacaattcgctatcacacacctccaagatcaagatcctgttctgagtcagatgatgatgacagcagtgaaactcctcctcactggaaagaggaaatgcagagattaagagcatatagaccacctagtggagaaaaatggagtaaaggagataagttaagtgacccctgttcaagccgatgggatgaaagaagcttgtctcagagatccagatcatggtcctataatggatattattcagaccttagtacagcaagacactctggccac

SEQ ID NO: 163 - DNA, 551 bp, Homo sapiens
gatgccctccaaggatgagctggtccagagatacaacaggatgaataccatcccccagacccgatccattcagtcacggttcctgcagagtcggaatctaaactgtatagcactttgtgaagtgattacatctaaggacctccagaagcatgggaacatctgggtgtgccctgtgtccgaccatgtctgcacaagattcttctttgtatatgaggatggtcaggtgggcgatgccaacattaatactcaggaccccaagatacagaaggaaatcatgcgtgtgatcggaactcaggtttacacaaactgagggggccccagccctcgtaccacccctgttaccccaggatccatctgccctcataaaagtgttcaggtacagcagctgaggctgccctgaggaatcaaggggccattaccaaggggcaggaaaaggatatgtaagaggtggccttcatggtagagcttgacccaagaactactccacattcggatggcccagactgactccatcccctgactttccctttgacttcaccctgtttgtaaat

SEQ ID NO: 164 - DNA, 436 bp, Homo sapiens
gaacccagagttattagagacttctaggaaatcaagagaacctacaggtgttgaagaaaataaaacagactcattgtttgttctcccaagtagagatgatgccacacctgttagagatgaaccaatggatgcagaatcaatcacttttaaatcagtgtctgaaaaagacaagagagaaagggataaaccaaaagcaaagggtgataaaaccaaacggaagaatgatggatctgctgtgtccaaaaaagaaaatattgtaaaacctgctaaaggaccccaagaaaaagtagatggagacgtgagagatctcctcgatctgaacctccaattaaaaaagccaaagaggagactccgaagactgacaatactaaatcatcatcttcctctcagaaggatgaaaaaatcactggaacccccagaaaagctcactctaaat

SEQ ID NO: 165 - DNA, 398 bp, Homo sapiens
  misc_feature (32)..(32): n is a, c, g, or t
  misc_feature (46)..(46): n is a, c, g, or t
  misc_feature (51)..(51): n is a, c, g, or t
  misc_feature (56)..(56): n is a, c, g, or t
  misc_feature (58)..(58): n is a, c, g, or t
  misc_feature (96)..(96): n is a, c, g, or t
  misc_feature (99)..(99): n is a, c, g, or t
  misc_feature (104)..(104): n is a, c, g, or t
  misc_feature (257)..(257): n is a, c, g, or t
ttcttatctcttggcatgtttgggaaattttnacatagccggcagntgaangtgcncnatggaaataagttgtccaaggtcacgcaatctgaactnccnctgantccccacctggtgtctctggtccctgagcccacatccccctaccacccactgttccacagctgccttcccagggacacagagtttgtgatcaatactgaataattctgccacgtctttattgtcatgccttcatcacctactacgtatgaagntgtccagaaacaggagggatttaagggtgagggagagaatgaagaagacagacacaggcataagagacaaaaagaaacctcaatgttattaaaaattcaagccaggtgtaggggtgcacacctgtagccctagttactagg

SEQ ID NO: 166 - DNA, 539 bp, Homo sapiens
ggccacttggagttcctcagtggggaaaagaaaaataagaagtcacctctagccatgtcccatgcctctggggtgaaaacctccccagaccctagacagggtgaggaggaaaccagagttggcaagaagctcaaaaaacacaagaaggaaaaaaagggggcccaggaccccacagccttctcggtccaggacccttggttctgtgaggccagggaggccagggatgttggggacacttgctcagtggggaagaaggatgaggaacaggcagccttggggcagaaacggaagcggaagagccccagagaacacaatgggaaggtgaagaagaaaaaaaaaatccaccaggagggagatgccctcccaggccactccaagccctccaggtccatggagagcagccctaggaaaggaagtaaaaagaagccagtcaaagttgaggctccggaatacatccccataagtgatgaccctaaggcctccgcaaagaaaaagatgaagtccaaaaagaaggtagagcagccagtcatcgaggagcc

SEQ ID NO: 167 - DNA, 367 bp, Homo sapiens
tgcgcaggggttaagccccgtggaccaaaggaaatgtgaacgtcttctgctttacctctattgccatgaattaagtattgaattccaggagcctgttcctgcttcgataccaaactactataaaattataaagaaaccaatggatttatccaccgtgaaaaagaagcttcagaaaaaacattcccaacactaccaaatcccggatgactttgtggccgatgtccgtttgatcttcaagaactgtgaaaggtttaatgaagctgattcagaagtagctcaggcagggaaagcagttgcattgtactttgaagataaactcacagagatctactcagacaggaccttcgcacctttgccagagtttgag

SEQ ID NO: 168 - DNA, 558 bp, Homo sapiens
  misc_feature (39)..(39): n is a, c, g, or t
  misc_feature (48)..(48): n is a, c, g, or t
  misc_feature (184)..(185): n is a, c, g, or t
atttgtattgccccatggctgacaaaagccttttttttnggttttgantttttttttttttgtaactgttggggggaaaaaggctttttaacccatttttgaagagggtgaagtttggagaacaaatttaaaaaccatcagtcatgtgagcagattttttagaagggataggagacacacgcgnncacacacacacacacacgaaacttgaaatggctttgctttggctgtcgtcttctgccgtgtgccagatgagcttgtgatctgggaagccggggcacccccgttttgtttctctgggcggttgtggcagctgaaggcggacgttgtttcctaaccataggtggaacgaggagacgggagcgagtgggctctccaccagcacatcactatgcatctgttccaggaaagaagaaaagcgagcgaggaagacggaaaagactgcctgccttggaggggtcacatgagggagacctgtgcctgatttcattaggaaatccattctgttattttttggtgctgttggctactttatcaaaaaacccttcaatagcatcc

SEQ ID NO: 169 - DNA, 509 bp, Homo sapiens
agctctgttgatgaggagtcttttcaatatccctcccaacaagcgactgtgaaaaaatcctcaaagaaatcagctcgggatgagcagggtgctttactcctaggacatgagttacagagctttctgaaaacagcccggaaaaagcacaagtcatcctcagacgcacattcatctcctggccctgaaggctgtgggtctgacgcctcccagttcgcagagtcccacagtgctaaccttgatctttcagggcttgaacctattctggtagaatcagactcatcctctggtggggaactagaggctggggagttagtgatagatgattcttaccgagaaatcaagaagaaaaagaagtcaaagaagagcaaaaagaagaaagacaaggagaagcataaagagaagcgacactccaagtccaagagaagtttaggactttctgccgtgccagtgggagaggtcacagtgacatctggccctcctcccagcatcccatacgctggagcagcagc

SEQ ID NO: 170 - DNA, 475 bp, Homo sapiens
gcagggtgtgctgcgtgaggagccccccggcaccttctctgtcattgaggaggagcggcctcaggaccgggacaacatggtgctcattgacagtgacgacgagagcgactccggcatggcctcccaggccgaccagaaggaggaggagctgctgctcttctggacgtacatccaggccatgctgaccaacctggagagcctctcactggatcgtatctacaacatgctccgcatgtttgtggtgactgggcctgcactggccgagattgacctgcaggagctgcagggctacctgcagaagaaggtgcgggaccagcagctcgtctactcggccggcgtctaccgcctgcccaagaactgcagctgacacatcgcccgcccgcccgcccgcccgccaggcgctgccctgcaggtgctctcgtcctcccgtgccagcccccgcccgcccgtgtcccagaatgcactgctgaggagc

SEQ ID NO: 171 - DNA, 463 bp, Homo sapiens
  misc_feature (321)..(321): n is a, c, g, or t
tcgtccagtaagaccgtcccggacgggaagctggtgaaagcttcctttgctccaataagctttgcaatcaaggccaaagaaaatgatctgcttcccctggaaaaaaatcgtgttaagctagatgatgacagtgatgatgatgaagaaagcaaagaaggccaagaaagttctagtagtgctgcaaacactaacccagcagttgccccaccctgtgtagttgttgaggagaagaagcctcaacttacccaggaggagctagaagcaaagcaagcaaagcaaaagctggaagatcgcctcgcagctgctgcccgggaaaagctngcccaggcgtctaaggagtcaaaagagaaacagcttcaagcagaacgtaaaaggaaagcggcgttatttttacagaccctcaaaaatcctctgccggaagcagaagctgggaaaattgaggagagtcctttcagtgtcgagg

SEQ ID NO: 172 - DNA, 153 bp, Homo sapiens
tttggctgtaagtttattcaatgcaaaagaatcctctccaattttactgaggtggctgaccacgtccacgaccaaatccgcctctaaactggaattcggttgctgacccagccccagcctcggctttcttgtcggcaccaggtggcacagcac

SEQ ID NO: 173 - DNA, 540 bp, Homo sapiens
  misc_feature (90)..(90): n is a, c, g, or t
tctatctctgcataacacgttccaacacagcagtagtggcctacagtctgtgtcatctttgggtcacagcagtgccacttctgcatcttngccttttatgccatttgtgatgggtggtgcaccatcatcccctcatgtagactccagcaccatgcttcatcaccaccaccaccacccccacccccaccatcaccaccatcaccatccaggcttgagagcccctggctacccctcttcaccagtgactaccgcctctggtactaccttgcggttgccaccactgcaacctgaggaggatgacgatgaggatgaagaagatgatgatgacttatctcagggctatgatagctcagaaagggacttctcactcattgatgatcctatgatgccagctaactcagactccagtgaagatgctgatgactgaagccccagcatgggccccattgcttgggcggctgctgtattttcatttactctggcccttggactatggaaacgtgggaggggcaggggagatgtggggaagtccaggactcc

SEQ ID NO: 174 - DNA, 143 bp, Homo sapiens
ggacaccaactaatgctgactccacgatcctgccaccctgtagcgccagtgtaatcccccaggagaacatctttgacactctgcagactgctagtgttctgtctaaaaaccagacaaggaaatacccttcttttatgagcaga

SEQ ID NO: 175 - DNA, 428 bp, Homo sapiens
ttctctttctctctgtttttaaaataatctaaagaaagcacattttaccattgctgttgggaggaagcagaggcagatgggaaagcagagagaggagcgcgcttcctttcctccccgctgccgcccaccctggggagagacttttgcggggagggaaggcggagctgaggacagccagctccgccctcccaaggctgtgcgttcctgagggccaggtcgggggcaggcatggaggggaggaaaggcgtccctcttggccctccccagagtggctttcctggcaccctggcctgggtgtctggttctgttttcttttcttccccttgtgtttccagtcacctaacttcccttcctcaggctcccccggcccaccctgctcagtgaccccacaggaagcttacacattttctcagaggcctttgtgctcc

SEQ ID NO: 176 - DNA, 406 bp, Homo sapiens
attcggaactgtgaagcaccttatattccagaagttagtagcccaacagatacatcgaattttgatgtagatgatgattgtttaaaaaattctgaaacgatgcccccaccaacacatactgcattttctggccaccatctgccatttgttggttttacatatactagtagctgtgtactttctgatcggagctgtttaagagttacggctggtcccacctcactggatcttgatgttaatgttcagaggactctagacaacaacttagcaactgaagcttatgaaagaagaattaagcgccttgagcaagaaaaacttgaactcagtagaaaacttcaagagtcaacacagactgtccaagctctgcagtattcaactgttgatggtccactaacagcaagcaaag

SEQ ID NO: 177 - DNA, 498 bp, Homo sapiens
ggatcctttgcaagacacgttgtctagtaccaaggaatctgaagaaggtcagttgaagtctgctttggaagctggccaggtctcatctgcactgacttgccactcctttggggatggatccggggctgcaggcttggagttgaactgcccatcaatgggagaaaacacgatgaaaacagaaccgacttctccccttgtggaattacaagagatttcgactgtggaagtaacaaatacttttaagaaaacagatgattttgggtcatctaatgcaccagctgtcgacctagaccataagtttagatgcaaagttgtggactgtttaaaatttttccgcaaagccaaactgttgcactatcacatgaagtatttccatggaatggagaagtcactggagccagaagagagcccgggaaagaggcatgtccaaaccaggggcccttcagcttcagacaagcccagccaggagaccctgaccaggaagcgggtctctgccag

SEQ ID NO: 178 - DNA, 560 bp, Homo sapiens
gttcagatccaaaagttcacttgctaattatcttcacaaaaatggagagacttctcttaagccagaagattttgattttactgtactttctaaaaggggtatcaagtcaagatataaagactgcagcatggcagccctgacatcccatctacaaaaccaaagtaacaattcaaactggaacctcaggacccgaagcaagtgcaaaaaggatgtgtttatgccgccaagtagtagttcagagttgcaggagagcagaggactctctaactttacttccactcatttgcttttgaaagaagatgagggtgttgatgatgttaacttcagaaaggttagaaagcccaaaggaaaggtgactattttgaaaggaatcccaattaagaaaactaaaaaaggatgtaggaagagctgttcaggttttgttcaaagtgatagcaaaagagaatctgtgtgtaataaagcagatgctgaaagtgaacctgttgcacaaaaaagtcagcttgatagaactgtctgcatttctgatgctggagcatgtggtgagaccctcagtgtgacca

SEQ ID NO: 179 - DNA, 479 bp, Homo sapiens
  misc_feature (49)..(49): n is a, c, g, or t
  misc_feature (96)..(96): n is a, c, g, or t
  misc_feature (103)..(103): n is a, c, g, or t
  misc_feature (106)..(109): n is a, c, g, or t
  misc_feature (113)..(115): n is a, c, g, or t
  misc_feature (118)..(118): n is a, c, g, or t
  misc_feature (120)..(126): n is a, c, g, or t
  misc_feature (128)..(129): n is a, c, g, or t
  misc_feature (131)..(131): n is a, c, g, or t
  misc_feature (133)..(133): n is a, c, g, or t
  misc_feature (136)..(137): n is a, c, g, or t
  misc_feature (139)..(172): n is a, c, g, or t
  misc_feature (178)..(179): n is a, c, g, or t
  misc_feature (367)..(367): n is a, c, g, or t
ctcgccgacagcaaggcaggcggctgagcagcggcctggagcagcaganccaggctttgtagcgaggccaggtcttcggccgcatccggtacgganagtgcanatnnnngaannnccngnnnnnnncnntntntanngnnnnnnnnnnnnnnnnnnnnnnnnnnnnnnnnnngcactnnccgccgggacatggcagcctggacgtggggctggggctgtgggcgctgctggcggggttgactcttccagtgagggcagaaccaggctggcaggaggggaggacggtgtacctgctgctcagagcccccaaggctctcctctgagagccaccaagcaggacagagcagctcttgtcccaggtccctcnggctgagcgccgtgtcaccaggagaatagtgctcacagcccaggcagggtgtgtggctcctggatgggctcgtggggcgggatgggacagggcacgggctctcagaaaataa

SEQ ID NO: 180 - DNA, 516 bp, Homo sapiens
  misc_feature (30)..(30): n is a, c, g, or t
  misc_feature (95)..(155): n is a, c, g, or t
  misc_feature (326)..(326): n is a, c, g, or t
ctgtgcccaggtgagccaagcaaagagccncagggtcctcatagcctccccacagtgtcctcaattccttaccaccctgggactcaccctcggannnnnnnnnnnnnnnnnnnnnnnnnnnnnnnnnnnnnnnnnnnnnnnnnnnnnnnnnnnnngcgatacaacttgacctcacaagacgtgggctctggcaccagcaataacagccaagcctgtgcccagttcctggagcagtatttccatgactcagacctggctcagttcatgcgcctcttcggtggcaactttgcacatcaggcatcagtagcccgtgtggttggacaacnagggccggggccgggccgggattgaggccagtctagatgtgcagtacctgatgagtgctggtgccaacatctccacctgggtctacagtagccctggtactaccaagaggactggacagtggggaagggggtgggagatgggtgttgatccctgctccctcaagggaatgctataagctggagagagatc

SEQ ID NO: 181 - DNA, 510 bp, Homo sapiens
tggaattggaggccgggcgcagtggctcacgcctgtaatcccagcactttgggaggccaaggtgggtggatcacctgaggtcaggagctcgagaccagcctggccaacatggtgaaaccccatctctactaaaaatacaaaaattagccaggtgtgatggtgcatgcctgtaatcccagctcctcagtaggctgagacaggagcatcacttgaacgtgggaggcagaggttgcagtgagccgagattgcaccaccgcactccagcctgggtgacagagcgagacttatctcataaataaatagatagatactccagcctgggtgacagagcgagacttatagatagatagatagatagatggatagatagatagatagatagatagatagataaacggaattggagccattttgctttaagtgaatggcagtcccttgtcttattcagaatataaaattcagtctgaatggcatcttacagattttacttcaatttttgtgtacggtatt

SEQ ID NO: 182 - DNA, 457 bp, Homo sapiens
  misc_feature (94)..(94): n is a, c, g, or t
gagctgtgtacacttaaacatgcttttgaagctggcagtatgaaaaacctggtactgaagataatatctggatcttttccacctgtgtctttgncattattcctatgatctccgcagtttggtgtctcagttatttaaaagaaatcctagggatagaccatcagtcaactccatattggagaaaggttttatagccaaacgcattgaaaagtttctctctcctcagcttattgcagaagaattttgtctaaaaacattttcgaagtttggatcacagcctataccagctaaaagaccagcttcaggacaaaactcgatttctgttatgcctgctcagaaaattacaaagcctgccgctaaatatggaatacctttagcatataagaaatatggagataaaaaattacacgaaaagaaaccactgcaaaaacataaacaggcccatcaaactccagag

SEQ ID NO: 183 - DNA, 318 bp, Homo sapiens
gctgctgcctattttgagggtcatcatttgaatgctgagaatgttgctggtcaccagattgcctctgaaacacagatccttgagggctctttgggaatatctgtaaagtcacactgcagcacaggtgatgctcatacagtcctgagtgagtctaacagaaatgatgagcactgtggaaattctaacaacaaatgtgaagtaattccagaaagcaccagtgcagtaacaaacattccacacgtgcagatggttgccatacaggtatcttggaacataatacaccaagaagtcaatactgagccatataatccttttgag

SEQ ID NO: 184 - DNA, 316 bp, Homo sapiens
ggaagagcagcgaagaggcacaaaaagagaggagaaggatatcaaatttattgaacataatggaaccaagcctccttcagttttatatttctcgacagtggcttaataaatttaagacctttgccgaacctggccctatttcaaataatgactttctttgtattcatggaggtgttcctccaagaaaagctggttatattgaagacctggttttgatgctgcctcagaacatttgggataacctatatagcaggtatggtggaggaccagctgtcaaccatctgtacatttgtcatacttgccaaattgaggcgga

SEQ ID NO: 185 - DNA, 341 bp, Homo sapiens
ccaggcactttcactagatgctgcaaataaaagctcaggtcatatgcaaacacagagctctccttttgctcggggaaatgtatttggtgagcctccaactgaacttcagattaaacagcaagaattatacaagaattttcttcgtttccagattgaggaaaagaaacaaagagaggaagcagagcgagagagactgagaattgcagaagaaaaagaagaaagacggcttgcagaacagagggcacgaattcagcaggagtatgaagaggaacaggaaaagaaaagagagaaagaggaggagcaaaggctaaaaaatgaagagcatattcggttagctgaag

SEQ ID NO: 186 - DNA, 530 bp, Homo sapiens
cccgctgtgtctgaagatgccttattcagggacaagctgaaacacatgggaaagtccacccggaggaaactgtttgaacttgcccgagccttctcagagaagaccaaaatgaggaagtcaaagaggaaacacttgttgaagcatcagtcgctgggggctgccgcgtcaacagccaacctcctggatgatgtggagggccacgcgtgtgatgaagacttccggggcaggcgtcaggaggcacccaaggtggaggaaggcctgcgagaaggacagtaagagatgccagcagctcttccttgccagagatgatctgacccggtgggggcagctggaaagcaacactggcccccagctgaagggcccagctgcagccagacagatggtgcttgagaaccgaggcccggtgatcctccagccacagtccagcccaaccactgccactttccatgggacttagaacttcggagttgctgccttgcaattggaggaaggacctggggcccctataggcagcagccaattacagcccc

SEQ ID NO: 187 - DNA, 483 bp, Homo sapiens
gtctgatgtggtccaggaactgctcaaatactcatctgataaagcttacgggagaaaagttctgacctgggatggcaagatgtcggcggtcagtcaggatgctattgaagacagcagacaggcccggactgagaccgtggttgatgactgggacgaagagtttgaccgagggaaggaaaagaaaattaaaaaatttaagagagagaagaggagaaacttcaacgccttccagaaacttcagactcgacggaacttctggtctgtgactcacccagcaaaggctgccagcctcagctatcgccgctgactgtgcccctgtggaaggagatgatcaagcggtgctgattcacgagagtggaagcctccagagcttggggctttctggctgctcttcattgacctgtgtgttcccagcacacgaacagcgcccctaacggagatttgttcagcgactgaatatacacctgtaaacgagtagcatgt

SEQ ID NO: 188 - DNA, 448 bp, Homo sapiens
  misc_feature (122)..(122): n is a, c, g, or t
cctataccctaccagatgtggctgaagtgctctgggagatcatgcaggttgacagaccgactttttgtcgatggttagaaaattccttaaaaggtttgccaaaggaaacaaccgtgggagcngtcacagtgacacacaaacaacttacagacttccacaagcaagtcactagtgctgaggaatgtaaacaagtttgctgggccttgcgagacttcaccaggttgtttcgatagctcacactcctgcactgtgcctgtcacccaggaatgtcttttttaattagaagacaggaagaaaacaaaaaccagactgtgtcccacaatcagaaacctccgttgtggcagaggggccttcaccgccaccagggtgtcccgccagacagggagagactccagccttctgaggccatcctgaggagttcctgtttgggggtgtgagggaaaatcag

SEQ ID NO: 189 - DNA, 98 bp, Homo sapiens
catggtggcatgcttctgtaatcccagctactcaggaggccgagattagagaatcacttgaatgtgggagtcggaggttgtaatgagctgagatcaca

SEQ ID NO: 190 - DNA, 571 bp, Homo sapiens
agcagtcggcatctcactgctatcactgtggatgtgtggacactccatgctgaactgcatgagggcctcttccagagccaactgctgtgccagggcccaagcctagcatctaagcctgttccctgttcagaggtgacagaaaacttagttgagccaactctgcctggcctattccttctccagcagctgccagaccaggtcaaggttaagatggagaacacaagcgtggtattgtccatgaatagtcaaaagaggcacctgacttggactctgaagctgctgcagttcctgtaccaccgtgatgaggatcagctgccccttcgaagcttcacagcaaactctgatatggcacagatgagcactgaactgctgctggaagatgggttgttgttgtcccagagtcgccaacgcattgtctgcctcaactccctcaaggctagtgtgcaggtgaccaccattgacctctcagcctccctagttctgaacacttgcatcattcactaccggcaccaggaattctctcactggctgcacctgctagcactggaaacccaagggtctagttcacctg

SEQ ID NO: 191 - DNA, 216 bp, Homo sapiens
gtgacaatgtcgcggggctggtagcagggcgccggccgccgagccgtctcaagtttaaacttacacgaatcgctttctggaggaggaggggacccgctgcgcgattgacacgcatattcctataggcatcctccctcagcccccacccccacggccggattcgggtggctcctctccgaggtgaaatctgagaagaaatccttggatctcttttct

SEQ ID NO: 192 - DNA, 372 bp, Homo sapiens
ctcgtcccgctgggaaagcgcgagtctgagtggaaccctggacgacttgcagagcggctggcgcagtcatggcggactactggaagtcacagccaaagaaattctgtgattactgcaagtgctggatagcagacaataggcctagtgttgaatttcatgaaagaggaaagaatcataaggaaaatgtggcaaaaaggatcagtgagattaaacagaaaagcctggataaggcaaaggaagaagaaaaggcatcaaaggagtttgctgcaatggaggcagctgccctgaaagcataccaagaggatttgaaaagacttggcttagagtcagaaattttggagccaagcataacaccagtaaccagcactatcc

SEQ ID NO: 193 - DNA, 215 bp, Homo sapiens
  misc_feature (26)..(26): n is a, c, g, or t
  misc_feature (144)..(144): n is a, c, g, or t
agtattttgacaggtcagcttttctnccatatgtaaataaagtgatgtagtaagtgagatttcaagtttcagacagtgaaatggaagatgatctaccttgataagcctattttgctgtaggagggaatagcaaatgtttggggnctgtggcctgacctcagaaacctcgatcacagagcacacctgcagagacttacttacctgctgtgaggtca

SEQ ID NO: 194 - DNA, 493 bp, Homo sapiens
agacctcacaagaaggatcatctgatgatgctgaaagaaaacaagagagagagactttctcttcagcagaaggcacagttgataaagacacgaccatcatggaattaagagatcgacttcctaagaagcagcaagcaagtgcttccactgatggtgtcgataagctttctgggaaagagcagagttttacttctttggaagttagaaaagttgctgaaactaaagaaaagagcaagcatctcaaaaccaaaacatgtaaaaaagtacaggatggcttatctgatattgcagagaaattcctaaagaaagaccagagcgatgaaacttctgaagatgataaaaagcagagcaaaaagggaactgaagaaaaaaagaaaccttcagactttaagaaaaaagtaattaaaatggaacaacagtatgaatcttcatctgatggcactgaaaagttacctgagcgagaagaaatttgtcattttcctaagggcataaa

SEQ ID NO: 195 - DNA, 523 bp, Homo sapiens
  misc_feature (191)..(191): n is a, c, g, or t
tagagccagccaagcaagccatgtctccttctgtggccgaatgtgccagagctgtgtttgcttccttcctctggcatgaaggcatagtacatgatgcaatggcttgttcttctttcctaaagtttcatcctgaactttccaaagaacatgctcctataaggagtagtttaaatagccaacaacctacagangaaaaagaaaccaagttaaaaaatagacattcattagaaatatcatctgcactgaatatgtttaatattgcaccccatggaccagatatatctaagatgggtagcatcaacaaaaacaaggtattgtctatgcttaaggaaccacctctgcatgaaaaatgtgaggatgggaaaaccgagaccacttttgaaatgtccatgcataacacaatgaagtctaagtctcctcttcccttaactttacaacatttagtggctttttgggaagacatctctttggctactatcaaagctgcttcccagaatatgatttttccaagtcctggttcctg

SEQ ID NO: 196 - DNA, 570 bp, Homo sapiens
  misc_feature (53)..(80): n is a, c, g, or t
  misc_feature (99)..(99): n is a, c, g, or t
  misc_feature (112)..(112): n is a, c, g, or t
  misc_feature (130)..(149): n is a, c, g, or t
  misc_feature (154)..(154): n is a, c, g, or t
  misc_feature (158)..(158): n is a, c, g, or t
  misc_feature (300)..(300): n is a, c, g, or t
  misc_feature (304)..(304): n is a, c, g, or t
  misc_feature (311)..(311): n is a, c, g, or t
  misc_feature (323)..(327): n is a, c, g, or t
  misc_feature (329)..(329): n is a, c, g, or t
  misc_feature (537)..(537): n is a, c, g, or t
  misc_feature (541)..(541): n is a, c, g, or t
tctccgcgtacacacgggcgagaaaccctttgcctgccccgagtgtggccagnnnnnnnnnnnnnnnnnnnnnnnnnnnngtcatcagaggacacacancggcgaaaagccntaccactgcggtgagtgnnnnnnnnnnnnnnnnnnnntctcncggntcaccgagcaccagcgcatccacacgggcgaacggcccttcgcctgccccgagtgcggccagagctttcggcagcacgccaacctcacccagcaccggcgcatccacacgggtgaacggccctacgcatgccctgagtgtgncaanggccttncgccagcggccnnnnntnacgcagcatctgcgcacccaccgacgagagaagcccttcgcctgccaggactgtggccgccgcttccaccagagcaccaagctcattcagcaccagcgcgtccacagcgccgagtagctccagccgggacgcactgtgtccgccatggtcagaacacctacctcccctggttattgtgaggctggcgattacataagtataagcaggntccncccagggcttggctactgtaggtgtccaa

SEQ ID NO: 197 - DNA, 540 bp, Homo sapiens
  misc_feature (65)..(66): n is a, c, g, or t
  misc_feature (69)..(69): n is a, c, g, or t
  misc_feature (77)..(77): n is a, c, g, or t
cagtgacacccgctaagacttgttggtagccatgtcggagccccacagggtccagttcacctctnnccnaggttccntgaatcctgcgtttttgaagaagtcccggaaggaggaggctggggcaggagaacagcatcaggactgtgagccggctgcagcagctgttcggattacactcaccctctttgaaccagatcacaaacgctgcccagagttcttctacccagagctggtgaagaatatccgagggaaggtaaaaggccttcagcctggagataagaagaaagatctgtcagatcctttcaatgacgaagaaaaggaaaggcataaagtagaggcccttgcccgaaaatttgaagaaaaatacggtggaaagaaacgtagaaaagaccgaatacaggacttgatcgatatggggtatggttatgatgaatccgactccttcatcgataactctgaggcgtatgatgagcttgttcctgcttctttgactacgaagtatggaggattttacattaactcgggaaccctgcagtttag

SEQ ID NO: 198 - DNA, 417 bp, Homo sapiens
cccgaactccaccggaggcaattgcactgtgtagccgtctgctggagtatacaccaactgcccgactaacaccactggaagcttgtgcacattcattttttgatgaattacgggacccaaatgtcaaactaccaaatgggcgagacacacctgcactcttcaacttcaccactcaagaactgtcaagtaatccacctctggctaccatccttattcctcctcatgctcggattcaagcagctgcttcaacccccacaaatgccacagcagcgtcagatgctaatactggagaccgtggacagaccaataatgctgcttctgcatcagcttccaactccacctgaacagtcccgagcagccagctgcacaggaaaaaccaccagttacttgagtgtcactcagcaacactggtcacgt

SEQ ID NO: 199 - DNA, 352 bp, Homo sapiens
gtttgatcatccagccaagattgccaagagtactaaatcctcttccctaaatttctccttcccttcacttcctacaatgggtcagatgcctgggcatagctcagacacaagtggcctttccttttcacagcccagctgtaaaactcgtgtccctcattcgaaactggataaagggcccactggggccaatggtcacaacacgacccagacaatagactatcaagacactgtgaatatgcttcactccctgctcagtgcccagggtgttcagcccactcagcccactgcatttgaatttgttcgtccttatagtgactatctgaatcctcggtctggtggaatctcctcgaga

SEQ ID NO: 200 - DNA, 295 bp, Homo sapiens
tgcaccggcacgagaagatccacaccaccgggcccaaggccctggccatgctgatgctgggggcggcggcggcgggggctctggccacacccccacccgctcccacctaggaggccaggaaagggggagcggggcgcccagggccactggaacagccccactggagtcaaggctccgagggaggagagaggggctcgggaagggagctggggcggtgagggcatggggtgaggcatggcgatgggggagggcgagggcgagaaagggcaggcactctgcgaattaaaggccttgg

SEQ ID NO: 201 - DNA, 472 bp, Homo sapiens
gccagtgtcacgtacagcatctgtggttccagtctgtgcttgacatgctccgccacttccacacacaccccatcccactggagtcagggggctcggccgacatcacccttcgcagctatgtgcgggcccaggaccccccaccagagccgggccccacgccccctgccgcgcccgcgtccccggcctgctggagcgactcgcccggccagcactacttctccagcctcgccgcggccgcctgcccgcctgcctcgccctccgacgccgccggcgcctcctcgtcttccgcctcgtcgtcctctgccgcgtcggggcccgcccccccgcgccccgtcgagggccagctcagcgcgcggagccgcagcaacagcgccgagcgcctgctggaggccgtggccgccaccgccgccgaggagcccccggaggccgcgcccggccgcgcgcgcgccgtggagaaccagtactccttcta

SEQ ID NO: 202 - DNA, 361 bp, Homo sapiens
tttcatagccacctcctattgctattgcagtgagttcaggtgctgcaagtatccacttaaaatgccacacattttaatcggcactgatcacctctgtttcagcagtttgtctctgtagtaaattgcctaccacagtaaaaggtaatctcttgtggttctcatgtatttttcatcgtgtttaatgcaatactgtaaactttgaataataccataagactcgtataaagtgatgccactagcactagtgatactggaagtgctcccaagaagaagagaaaagtctgacattacaagaaaaagttgaattgcttggtatgtaccatagattaatgtctgcagctgctattctgccatttcaaga

SEQ ID NO: 203 - DNA, 541 bp, Homo sapiens
tccttccccagtgatcactgtcataaccagtgctctaccgtatcccatcactgaggactgatgttgactgacatcattttatcgtaataaacatgtggctctattagctgcaagctttaccaagtaattggcatgacatctgagcacagaaattaaggcaaaaaaccaaagcaaaacaaatacatggtgctgaaattaacttgatgccaagcccaaggcagctgatttctgtgtatttgaacttagggcaaatcagagtctacacagacgcctacagaaagtttcaggaagaggcaagatgcattcaatttgaaagatatttatgggcaacaaagtaaggtcaggattagacttcaggcattcataaggcaggcactatcagaaagtgtacgccaactaagggacccacaaagcaggcagaggtaatgcagaaatctgttttgttcccatgaaatcaccaatcaaggcctccgttcttctaaagattagtccatcatcattagcaactgagatcaaagcactcttccactttacgtgatta

SEQ ID NO: 204 - DNA, 446 bp, Homo sapiens
ctgcagcggcatcctcaaggagatgtttgccaagaagcacgccgcctacgcctggcccttctacaagcctgtggacgtggaggcactgggcctacacgactactgtgacatcatcaagcaccccatggacatgagcacaatcaagtctaaactggaggcccgtgagtaccgtgatgctcaggagtttggtgctgacgtccgattgatgttctccaactgctataagtacaaccctcctgaccatgaggtggtggccatggcccgcaagctccaggatgtgttcgaaatgcgctttgccaagatgccggacgagcctgaggagccagtggtggccgtgtcctccccggcagtgccccctcccaccaaggttgtggccccgccctcatccagcgacagcagcagcgatagctcctcggacagtgacagttcgactgatgactctgagg

SEQ ID NO: 205 - DNA, 449 bp, Homo sapiens
gaatctcatagcttgtcagctcatttgcagcttacatttttggtttcttccacaaaaatgataagccatcaccaaactcagaaaatgaacaaaattctgttaccctggaagtcctgcttgtgaaagtttgccacaaaaaaagaaaggatgtatgttgtccaataaggcaagttcccacaggtaaaaagcaggtgcctttgaatcctgacctcaatcaaacaaaacctggaaatttcccgtcccttgcagtttccagtaatgaatttgaacctagtaacagccacatggtgaagtcttactcgttgctatttagagtgactcgtccaagaagaagagagtttaatggaatgattaatggagaaaccatgaaaatattgatgtcagtgaagagcttccagccagaagaaaatgaaatcgtgaggatggggaaaagacatttgttgcacaaa

SEQ ID NO: 206 - DNA, 421 bp, Homo sapiens
caacttcctcactgatgctaagcgcccagctctgcctgagatcaagccagcccagccacctggccccgcccagagtttgaccccaggactcccctacccacaccagactccccagggcctgatgccctatggtcagccccggcccccgatcttgggctatggagctggtgctgtccgccctgcagtccccacaggaggccctccatacccccatgccccgtatggtgctggtcgagggaactatgatgccttccgaggccagggaggttatcctgggaaacctcgcaacaggatggttcgtggagacccaagggccattgtggaatatcgggacctggatgccccagacgatgttgatttcttttgagccgtcccccgttcctcagtcctgtatcatccatacttgtactaccttgtccta

SEQ ID NO: 207 - DNA, 558 bp, Homo sapiens
tgcagtgtgaattctgccccgtgacccggtggaaaatggcgatgttgtggtttatttgaaatacaacaatgtccaagaggataagcactgcaactttcttcatgtgttcagaaatcccaacaatgaattctgggaagctaatagagacatctacttgtctccagatcggactggctcctcctttgggaagaactccgaaaggagggagaggatgggccaccacgacgactactacagcaggctgcggggaaggagaaaccctagtccagaccactcctacaaaagaaatggggaatccgagaggaaaagtagtcgtcacagggggaagaaatctcacaaacgcacatcaaagagtcgggagaggcacaattcacgaagcagaggaagaaatagggaccgcagcagggaccgcagccggggccggggcagccggagccggagccggagccggagccgcaggagccgccgcagccggagccaaagttcctctaggtcccgaagtcgtggcaggaggaggtcgggtaatagagacagaactgttcagagtcccaaatccaa

SEQ ID NO: 208 - DNA, 450 bp, Homo sapiens
tccaactcaggctaccagcagaacccgtgctcgcttagctgccacggagacgcctccaaattctatggctacgaggcgctccccagacagtccctttatggggctcagcaagaggcgagcgtggtgcaatatcccgactgtaaatcctccgccaacactaacagtagcgaaggacaaggccacttaaatcaaaactcgtctcccagcctcatgtttccatggatgagaccccacgctccggggaggcgcagtggacggcaaacttacagccggtatcagaccttggaactagaaaaggagtttctctttaatccttatttgacacgaaaacgtcggattgaagtctctcatgccctgggactgaccgagagacaagtgaagatctggttccagaaccgaaggatgaagtggaaaaaggagaacaacaaggataaactgccgggagcccga

SEQ ID NO: 209 - DNA, 528 bp, Homo sapiens
gtccatcagatttgctctgggccagtggtactgagtctaagcactgcagtgaaggagttagtagaaaacagtctggatgctggtgccactaatattgatctaaagcttaaggactatggagtggatctcattgaagtttcagacaatggatgtggggtagaagaagaaaactttgaaggcttaactctttcagctctgaaacatcacacatgtaagattcaagagtttgccgacctaactgaagttgaaactttcggttttcagggggaagctctgagctcactgtgtgcactgagcgatgtcaccatttctacctgccacgcgtcggtgaaggttgggactcgactggtgtttgatcacgatgggaaaatcatccaggaaaccccctaccccccaccccagaggaccacagtcagcgtgaagcagttattttctacgctacctgtgcgccataaggaatttcaaaggaatattaagaagacgtgcctgcttccccttcgccttctgccgtgattgtcagtttcctga

SEQ ID NO: 210 - DNA, 249 bp, Homo sapiens
gctgcagtggagctttttaaccgtgattggagataccacaaagaagaacgagtatggattaccagggcaccaggcatggagccaacaatgaaaaccaatacctatgagaggggaacatattacttctttgactgtcttaactggaggaaagtagctaaggagttccatctggaatatgacaaattagaagaacggcctcacctgccatccaccttcaactacaaccctgctcagcaagccttctaaaaa

SEQ ID NO: 211 - DNA, 517 bp, Homo sapiens
  misc_feature (383)..(383): n is a, c, g, or t
  misc_feature (394)..(394): n is a, c, g, or t
gctctgggccagtggtactgagtctaagcactgcagtgaaggagttagtagaaaacagtctggatgctggtgccactaatattgatctaaagcttaaggactatggagtggatctcattgaagtttcagacaatggatgtggggtagaagaagaaaactttgaaggcttaatctctttcagctctgaaacatcacacatgtaagattcaagagtttgccgacctaactgaagttgaaactttcggttttcagggggaagctctgagctcactgtgtgcactgagcgatgtcaccatttctacctgccacgcgtcggtgaaggttgggactcgactggtgtttgatcacgatgggaaaatcatccaggaaaccccctacccccnaccccagaggnaccacagtcagcgtgaagcagttattttctacgctacctgtgcgccataaggaatttcaaaggaatattaagaagacgtgcctgcttccccttcgccttctgccgtgattgtcagtttcctga

SEQ ID NO: 212 - DNA, 202 bp, Homo sapiens
gctgtcttcaggtaggcagaggccagctggagggacgccccctgagcatggctgggaccccagaggggacccaggaaggtggggagagctgcagctggggagactgcagggcaagctgctccaaagctggctttgctttccagaccaaggttgggatccaaatgcgaatctgagaaaactgctcccaggaatcaaatagtgg

SEQ ID NO: 213 - DNA, 514 bp, Homo sapiens
  misc_feature (202)..(202): n is a, c, g, or t
  misc_feature (214)..(214): n is a, c, g, or t
  misc_feature (227)..(227): n is a, c, g, or t
  misc_feature (234)..(235): n is a, c, g, or t
  misc_feature (244)..(244): n is a, c, g, or t
  misc_feature (276)..(276): n is a, c, g, or t
  misc_feature (283)..(283): n is a, c, g, or t
  misc_feature (350)..(350): n is a, c, g, or t
  misc_feature (354)..(354): n is a, c, g, or t
  misc_feature (360)..(360): n is a, c, g, or t
  misc_feature (392)..(392): n is a, c, g, or t
  misc_feature (459)..(459): n is a, c, g, or t
  misc_feature (461)..(461): n is a, c, g, or t
  misc_feature (463)..(465): n is a, c, g, or t
  misc_feature (468)..(468): n is a, c, g, or t
gaaggcttaatctctttcagctctgaaacatcacacatctaagattcgagagtttgccgacctaactcgggttgaaacttttggctttcgggggaaagctctgagctcactttgtgcactgagtgatgtcaccatttctacctgccacgtatcggcgaaggttgggactcgactggtgtttgatcacgatgggaaaatcatncagaaaaccccntacccccaccccngagggannacagtcagngtgaagcagttattttctacgctacctgtgcnccataangaatttcaaaggaatattaagaagaaacgtgcctgcttccccttcgccttctgccgtgattgtcagnttcntgaggnctccccagccatgcttcctgtacagcctgcanaactgactcctagaagtaccccaccccacccctgctccttggaggacaacgtgatcactgtattcancncnnncangaatggtccaggttcttctagatgatctgcacaaatggctcctctc

SEQ ID NO: 214 - DNA, 476 bp, Homo sapiens
ggcaggtggatgacttgagctcaggagtttgagaccagcctgggcaacatgatgaaaactccgtctctaccaaaaatcaaaaaaattagccaggtgtgatgttgtgcgcctgtagtcccagctacttgtgaggctgaggtgggaggatggtttgggccccggaggtagaggttgcagtgagctgagattgtgccactgtattccatcctgggcaacagagccagaccctgcctcaaaaaaaaaaaaaaaaaaaaaaaggcctggcacagtggctcacgcctgtaatcccagcactttgggaggctgaggcgggcaaaacacttgaggtcagacgtttgagaccagcctggccaacatggtgaaaccccgtctctaccaaaaataaaaataaaaattatccaggcgtggtggcatgtgcctatagccccagctactcaggaagctagagcacgagaattatgtgcatcctggaggtg

SEQ ID NO: 215 - DNA, 556 bp, Homo sapiens
gtgtttccagtgactactgaccctctggtgccagcaggccccgtcagttcctcttccacggctacctcagtcactgccagcaacccctccttcatgctcaacccttctgtgccagggatactacccagctattcactcccattctcacagccactcctgtccgagccgaggatgtttgcgccttttccttcccctgtcttgcccagcaacctttcgcggggcatgtctatctatccaggctacatgtccccacatgcaggctacccagctggtggcctcctacggtcccaggtgcctccatttgactctcatgaggttgccgaggttgggttcagctccaatgatgatgaggataaagacgatgatgtgatagaggtcactgggaaatagctagggagcccctccccacctcacttggggcccccagcaggttgcccaccaagctggaaggcagtgatttagaccttttgagaataggacacttggcaggagggaaaaggaagaggacaaaggagggtggttggccaaagtggcagagctctgttgctgtttaaca

SEQ ID NO: 216 - DNA, 559 bp, Homo sapiens
  misc_feature (400)..(400): n is a, c, g, or t
cccagggcctgatgccctatggtcagccccggcccccgatcttgggctatggaggtaagtacaggagggagatgaaggggcttggtgagtgtgtggctttgggagaagaaaacagaggatggaattgaggacatagttttgcaactcaacactgatctctgtcatagctggtgctgtccgccctgcagtccccacaggaggccctccatacccccatgccccgtatggtgctggtcgagggaactatgatgccttccgaggccagggaggttatcctgggaaacctcgcaacaggtgaggagggcagacgcccaagctttgttgccgcctgcagactcccttttgggagccctcagctctcatcctgtacctctcacctcacaggatggttcgtggaganccaagggccattgtggaatatcgggacctggatgccccagacgatgttgatttcttttgagccgtcccccgttcctcagtcctgtatcatccatacttgtactaccttgtcctatgaagctctgagaattttttgtacgatcagccttactgctaataa

SEQ ID NO: 217 - DNA, 372 bp, Homo sapiens
cctgcggaggtgggcggcatgcagctccgctttgcccggctctccgagcacgccacggcccccacccggggctccgcgcgcgccgcgggctacgacctgtacagtgcctatgattacacaataccacctatggagaaagctgttgtgaaaacggacattcagatagcgctcccttctgggtgttatggaagagtggctccacggtcaggcttggctgcaaaacactttattgatgtaggagctggtgtcatagatgaagattatagaggaaatgttggtgttgtactgtttaattttggcaaagaaaagtttgaagtcaaaaaaggtgatcgaattgcacagctcatttgcgaacggattttttatccagaa

SEQ ID NO: 218 - DNA, 420 bp, Homo sapiens
tcttggtccagagatcttcagcctcgttcacattcttatgatagaagacgcaggcatcgatcaagcagtagctcttcttatggctccagaaggaaacgaagtcgaagtcgttcaaggggtcgagggaaatcctatagagttcagaggtctaggtcaaaaagcagaacaagaaggtccaggtcaagacctcgtctccgttctcatagtcgtagcagtgaaaggtccagtcacagaagaacgcgtagtcggtctcgggatagagaacgacgtaagggcagagataaagagaaaagagaaaagggagaggataaagggaaggacaaggaatacataacatcaaacgtgggaatctggaaacatcaaagctggatttagaacatcttgccaccagctgaacaggccaaagccagactacagctg

SEQ ID NO: 219 - DNA, 444 bp, Homo sapiens
cagatgcaaaatcaccccttctgcaagaaagcctctttgcaaccgggtcagaatggcggcagtggagcatcgtcattcttcaggattgccctactggccctacctcacagctgaaactttaaaaaacaggatgggccaccagccacctcctccaactcaacaacattctataattgataactccctgagcctcaagacaccttccgagtgtctgctcactccccttccaccctcagctctaccctcagcggatgataatctcaagacacctgcggagtgtctgctctatccccttccaccctcagcggatgataatctcaagacacctcccgagtgtctgctcactccccttccaccctcagctccaccctcagcggatgataatctcaagacacctcccgagtgtgtctgctcactccccttccaccctcagcggatgataat

SEQ ID NO: 220 - DNA, 318 bp, Homo sapiens
  misc_feature (104)..(118): n is a, c, g, or t
  misc_feature (159)..(159): n is a, c, g, or t
ccagccgggttctcatggtgctcaaacccgctcccctcccctacgtcctgcactttctcggaccagtccccccactcccgacccgaccccagccccacctgagnnnnnnnnnnnnnnntactgtaggggaagaagtgggaactgaaatggtattttgtnaaaaaaaataaataaaataaaaaaattaaaggttttaaagaaagaactatgaggaaaaggaaccccgtccttcccagccccggccaactttaaaaaacacagaccttcacccccacccccttttctttttaagtgtgaaacaacccagggccagggcct

SEQ ID NO: 221 - DNA, 327 bp, Homo sapiens
  misc_feature (199)..(199): n is a, c, g, or t
ccacctgtgaccccgtggtggaggagcatttccgcaggagcctgggcaagaattacaaggagcccgagccggcacccaactccgtgtccatcacgggctccgtggacgaccactttgccaaagctctgggtgacacgtggctccagatcaaagcggccaaggacggagcatccagcagccctgagtccgcctctcgcangggccagcccgccagcccctctgcccacatggtcagccacagtcactccccctctgtggtctcctgaagggagcgcctcctccaacaacacgtggatctgcatggtttgcctgagctttgaacagtca

SEQ ID NO: 222 - DNA, 517 bp, Homo sapiens
ggacgtgtgtggttgactgggatgaagttggagggaggggcagggccttgcaggggattggtactgatcccagggaggaagtgttggggcttcatgaactaggatgaaaggaggcccctgagccatgacaaggggcacatccaggatttccgccaccctgaatttagtagagctagtaggccctggtcgtcactctgggcagggatgccgtcagccttgagggtcgccacccacctgtgtgttgccctctgtcctggcggggaaacatacaccccttgtctcaccaccaaccttgcttgtgtagtcagcagggctggccctgccccaaggactcactgcatgtacccggacccctaggcctggcctttgcagcatagttgggagcttctggattccatctgcacctgtgagccccatgctggctgtgcactgcgcgggcctgagactgctggatacaatgttgggcaacaactcagccagcctgatggcagcctcagaggcttactctaacccatcc

SEQ ID NO: 223 - DNA, 431 bp, Homo sapiens
ggccggcttggaatttttaatagtggttacaatgtgggcaggggcttgtgtggtttggatttcctgcttgcaccaacaaagagcatccagactttcacatgagcttgcccagatgcaaggcacaagggggtgagggaaagggaaggcttaaaagttgttagcaggccgggtgttgtgactcaaaatactgtaatctcagcattttgggagacctaggtgggtggatcacttgagcccagaggtttgcaaccagcctgagcaaaatattgagactcctgtctctccaaaacaataaaaaataaataaacaaataaataaataaatggctagacataatggtgtgcacctgtagtcccagctgtttgggaagctgaaatggaaggatcgcttgaggcccagagtctgaggctgcggtaagctgtgttcgcacc

SEQ ID NO: 224 - DNA, 509 bp, Homo sapiens
  misc_feature (28)..(28): n is a, c, g, or t
  misc_feature (37)..(37): n is a, c, g, or t
  misc_feature (50)..(50): n is a, c, g, or t
  misc_feature (54)..(54): n is a, c, g, or t
  misc_feature (58)..(58): n is a, c, g, or t
  misc_feature (73)..(73): n is a, c, g, or t
  misc_feature (76)..(77): n is a, c, g, or t
tgtctggggatgctaccatccctccacnccctccttngcctgagggtgtnggcntccncttcaccctcttctntgnntggaggtactgccatccccccacctcctcctttgcctgggagtgctagaatcccccaccaccacctcctttgcctgggagtgctggaattccccccccacctcctcccttgcctggagaagcaggaatgccacctcctcctccccctcttcctggtggtcctggaatccctccacctcctccatttcccggaggccctggcattcctccacctccacccggaatgggtatgcctccacctcccccatttggatttggagttcctgcagccccagttctgccatttggattaacccccaaaaagctttataagccagaggtgcagctccggaggccaaactggtccaagcttgtggctgaggacctctcccaggactgcttctggacaaaggtgaaggaggaccgctttgagaacaatgaacttttcgccaaa

SEQ ID NO: 225 - DNA, 436 bp, Homo sapiens
aagagagtacaaggtgcttccggaaagcttcaagccttcggattctgtgagtacaaggagccagaatctaccctccgtgcactcagattattacatgacctgcaaattggagagaaaaagctactcgttaaagttgatgcaaagacaaaggcacagctggatgaatggaaagcaaagaagaaagcttctaatgggaatgcaaggccagaaactgtcactaatgacgatgaagaagccttggatgaagaaacaaagaggagagatcagatgattaaaggggctattgaagttttaattcgtgaatactccagtgagctaaatgccccctcacaggaatctgattctcaccccaggaagaagaagaaggaaaagaaggaggacattttccgcagatttccagtggccccactgatcccttatccactcatcactaagg

SEQ ID NO: 226 - DNA, 351 bp, Homo sapiens
gaaatggcggggactgttggtctcggccctgcggaaggttcaggaacaagtgcatcccactctctcagctaatgaagagtctctctattatattgaagagctgatttttcagctgcttaataaattatgcatggcccagccaaggactgttcaagatgtagaggagcgagttcagaagacctttcctcacccaattgataaatgggccattgctgatgcacaatctgctatagaaaaacgaaaacgaagaaatcctcttttactgcctgtggacaaaatccatccttcgttgaaggaagtattagggtacaaagtggactaccatgtatccctatatattgtggctgtact

SEQ ID NO: 227 - DNA, 415 bp, Homo sapiens
  misc_feature (121)..(121): n is a, c, g, or t
  misc_feature (124)..(124): n is a, c, g, or t
  misc_feature (162)..(162): n is a, c, g, or t
  misc_feature (184)..(184): n is a, c, g, or t
  misc_feature (193)..(193): n is a, c, g, or t
  misc_feature (209)..(216): n is a, c, g, or t
gaaaaagggccagtgtctcccaggaatctgcaggagtctgaagaggaggaagtcccccaggagtcctgggatgaaggttattcgactctctcaattcctcctgaaatgttggcctcgtacnagncttacagcggcacatttcactcattagaggaacagcangtctgcatggctgttgacatangcggacatnggtgggatcaagtgannnnnnnnaggaccaagaggcaacaggtcccaggctcagcagggagctgctggatgagaaagggcctgaagtcttgcaggactcactggatagatgttattcaactccttcaggttatcttgaactgactgactcatgccagccctacagaagtgccttttacatattggagcaacagcgtgttggctgggctcttgacatggatga

SEQ ID NO: 228 - DNA, 526 bp, Homo sapiens
gaaatggccactgcttgatgtccaggcagggagcctccagagtagacaagccctcaaggatgcccggtccccatcaccggcacacattgtctctaacaaagtgccagtggtgcagcaccctcaccatgtccaccccctcacgcctcttatcacgtacagcaatgaacacttcacgccgggaaacccacctccacacttaccagccgacgtagaccccaaaacaggaatcccacggcctccgcaccctccagatatatccccgtattacccactatcgcctggcaccgtaggacaaatcccccatccgctaggatggttagtaccacagcaaggtcaaccagtgtacccaatcacgacaggaggattcagacacccctaccccacagctctgaccgtcaatgcttccatgtccaggttccctccccatatggtcccaccacatcatacgctacacacgacgggcattccgcatccggccatagtcacaccaacagtcaaacaggaatcgtcccagagtgatgtcggc

SEQ ID NO: 229 - DNA, 293 bp, Homo sapiens
  misc_feature (30)..(51): n is a, c, g, or t
  misc_feature (157)..(173): n is a, c, g, or t
catctttgaggaaccccgggagcgcaatgnnnnnnnnnnnnnnnnnnnnnnaaggaagctccggcgggctgtggaatttcgggacagcagccttcctcgatcacgaagaccgtcccgtggggtccgggctgcagggggcaggactgttcctcccaannnnnnnnnnnnnnnnnatgtgggccccctgctccagcagcggctggaggagctagatgccttgctcctggaggaagaaacagtagatcgggagcagccccactggacctaggtgccccatctgttggtcatccatc

SEQ ID NO: 230 - DNA, 522 bp, Homo sapiens
  misc_feature (45)..(45): n is a, c, g, or t
  misc_feature (409)..(409): n is a, c, g, or t
ggcccagtacctcgaggagaagcgcaggcgcgagcgtgagtgggnaagctcgtgagagggagctgcgggagcgggaggccctcctggcccagcgcgaggaggaggtgcagcaggggcagcaggacctggaaaaggagcgggaggagctccagcagaagaagggcacataccagtatgacctggagcgactgcgtgctgcccagaaacagcttgagagggaacaggagcagctgcgccgggaggcagagcggctcagccagcggcagacagaacgggacctgtgtcaggtttcccatccacataccaagctgatgaggatcccatcgttcttccccagtcctgaggagcccccctcgccatctgcaccttccatagccaaatcagggtcattggactcagaactttcagngtccccaaaaaggaacagcatctctcggacacacaaagataaggggccttttcacatactgagttcaaccagccagacaaacaaaggaccagaagggcagagccaggcccctg

SEQ ID NO: 231 - DNA, 578 bp, Homo sapiens
  misc_feature (44)..(44): n is a, c, g, or t
gtcagtgaagggcctcttcttagtgaggggagtctctctgaagnagagggagaccaggatggacagccccttttgaaagtagcagaaattttaaaagaaaaggaattttgtcctggagaaagaaatagttatgaacccatcaaagagtttcagaaagaagctgaaaaattcttgccactttttgggcacataggtggtacacaaagcaaaggaccatgggaagaattggcaaagggaagtccacatagcgtcattaatatttttacaaaatcctatcagttatatggaaaagggtttgaagacaagttggacagaggaacatcaacatcacggcctttgaatgccaccgcaactcctctaagtggtgtttcatatgaagatgattttgtctcctctccagggactgggacttcgacagaaaaaaaatcaactcttgaacctcatagcactttaagccctcaggaggaccattctaacagaaagtctgcctatgatccttcctctgtggatgttacctcccagcattcatcaggagcccagtctgctgcatcgtctcgttcatctacttcttctaaagg

SEQ ID NO: 232 - DNA, 526 bp, Homo sapiens
  misc_feature (58)..(58): n is a, c, g, or t
  misc_feature (76)..(76): n is a, c, g, or t
  misc_feature (87)..(87): n is a, c, g, or t
  misc_feature (119)..(119): n is a, c, g, or t
  misc_feature (133)..(133): n is a, c, g, or t
  misc_feature (474)..(474): n is a, c, g, or t
gaaaagaggctgcttcaggcaccacacctcagaagtcccggaagcccaagaaaggggntgggaacccccaagcctnaaccctggcgntgcaaagcaacatcacccagtgcctcctgggnccaaccctggcccntgaatgaggcccaggtgcaggcctcagtggtgaaggtcctgactgagctgctggaacaggaaagaaagaaggtggtggacaccaccaaggagagcagcaggaagggctgggagagccgcaagcggaagctatcgggagaccagccagctgccaggacccccaggagcaagaagaagaagaagctgggggccggggaaggtggggaggcctctgtttccccagaaaagacctccacgacttccaaggggaaagcaaagagagacaaagcaagtggtgatgtcaaggagaagaaagggaaggggtctcttggctcccaaggggccaaggacgagccagaagangagcttcagaaggggatggggacggttgaaggtggagatcaaagcaacccaa

SEQ ID NO: 233 - DNA, 461 bp, Homo sapiens
cagcatcaaaaataccctactaatatactcccctctgaaaccagaaatgagaagtcagcttcaaataaagaccctgcacaaagcctcagcctggtgaaaacatccgaaaataagtctacggactgtactcaatctacactgcaattaaaggaaaacccataggtggaaatgagaagaaaccaatgcaagaactccagtaactcaaatggcctctgtgtcatatgtccttctaacaaccacaccagttctccaacaagagttcttaacctggatgaactgtctggaattacataaatataattcagaatatggataggaaaaaaaatcatcaagactcaggagaatggcaaaacccaatccaaggaaaataagaataacagtaaagtgttacaggagctgaaggataaagtagctggtataataaaaaagaacctaaccgatctgaaagcgccgaagaacac

SEQ ID NO: 234 - DNA, 500 bp, Homo sapiens
ggatagtgccaaagaactgcagaggagtgtggaatttgatagagaattttgggaaagagaatttttttaaaagtgatgaaactgaagatctctttttaaatatggaacatgaatccttaacattagaaaaaaaatcaaaattggaaaaaaacatcaaagatgataaatcaaccaaggaaaagcatgtgtcaaaagagaggaactttaaagaggaacgagacaagattaaaaaggaaagcgagaatttacttctttggggtatgagtgccattgaggaatctatagggcttcatttagtggaaaaggaaatagacattgaaaaacaagaaaagcatataaaggaaagtaaagaaaaacctgagaagcgatctcaaattaaagaaaaggacattgagaagatggaaagaaaaacctttgacaaaggacaagcttatattcgcatcacacagacaaaatggccatacaagaagggtgagaaggagcaaaaatactgctgctta

SEQ ID NO: 235 - DNA, 506 bp, Homo sapiens
ctccccctcctaaacgaagagcatcaccatctccaccaccaaagcggcgggtctcccattctccacctcccaaacaaagaagctccccagtcaccaagagacgttcaccttcattatcatccaagcataggaaagggtcttccccaagccgctctacccgggaggcccgatcaccacaaccaaacaaacggcattcgccctcaccacggcctcgagctcctcagacctcctcaagtcctccacccgttcgaagaggagcgtcgtcatcaccccaaagaaggcagtccccgtctccaagtactaggcccattaggagagtctccaggactccggaacctaaaaagataaaaaaggctgcttccccaagcccacagtctgtaagaagggtctcatcctcccgatctgtctccgggtctcctgagccagcagctaaaaagcccccagcacctccatcccccgtccagtctcagtcaccgtctacaaactggtcaccagctgtaccggtc

SEQ ID NO: 236 - DNA, 262 bp, Homo sapiens
aggtatgtgggaggagtggtgagatcatagctcacacctgtaatcccagcctggaatgcagtggtgcaatcacagctcacagcaacttcaaactcctgagcactggggcaggaggatcgcttgtgcccagaagtttgaggctgcagtgagccgtcatcacaccagtacactccaggctaggtcacagagaccgtgtctcaaaatcaaaaacaaacaaacaaaaactcaagatcctcatagtagacgcaaacttcctttgttg

SEQ ID NO: 237 - DNA, 446 bp, Homo sapiens
tgtagggtttcaccagtctttcccagggaactccgatgaagtgttccaacaaaatgagcgagtgaaccaagaagaggatgacattagatccaggagatacaacagaggagataatctccaggatgcctgtgaagaaagatccctggatcccaggatgattataggacaagttgttcataatccagcaggccagaagacttccagggaaactcattcaaggaggtgaaaatgatggatgactcctccaagatgaaaatggaccagccgcagtgctcacgcctgtaataccagcactttgggaggctgaggcaggcggatcacttgaggtcaggagtttgaaactagcctggccaacgtggcaaaactccatctctattaaaaatacaaaaattagccaggcatagtggtgcatgcctgtagtcccagctacttgggatgccgaggca

SEQ ID NO: 238 - DNA, 574 bp, Homo sapiens
  misc_feature (109)..(111): n is a, c, g, or t
  misc_feature (354)..(354): n is a, c, g, or t
catctttctcgttgaccaatgggcttgaagcattaaggccacgcccctattctgcattctactgtggccctggttacgctgcctctgggtcagttacgcagctgtcttnnnggtgactggacgtgttgatcagcgctcgctgggatttggctgacgtggccccagccccgcctccctccccaccccacaatggcagaagaaactggacagagtaaattagctgcagccaagaaaaagttcaaagaatattggcagagaaaccgccctggtgttccagcagcagcgaagaggaacacgaaagcaaatggcagtagccctgagacggccgcttctggtggttgccactcatctgangctgtgagtcttgcctggacaggcttttggggacagggggcccaaggagcagtagagggcaatcgttaagattgtggatggactgttgggtactggtgaaggattctggatttggccgggcacagtggctcacgcctgtaatccccacacttcgggagaccgaggcaggtggatcacaaggtcaggagatcgagaccatccaggcaaacacggtgaaata

SEQ ID NO: 239 - DNA, 463 bp, Homo sapiens
acagttatgttgattcttaaatgggaatggtgagttagaaattcccagacatgggcgatggggagggaagaggaataagaaaagttacgaggtagaattaggggccttgaaaatatgacaaactctgagggaaacaaagacaatgtggaaagaataacttaattttaattccatctccagagagatttgaggtgtatttaagatgaaaaacaggatactacaaagaaacggaaaactcaggagttcaagaccagcctaggcaagatggcaacatcccgtctctacaaaataatttttaaaaattagccaagcatggtggcatgtgcctgtggtcctagctacttgggaggctgaagtgggaagatcacttgagcccaggagttcaaggcttcagtgagccatgatggtgccactgcactccagcctgggggacagagtgagaccctgtctcttaaaaagcaag

SEQ ID NO: 240 - DNA, 426 bp, Homo sapiens
agcaatcagcagtgcttctagccctcagagccctggggatgcactgagaagagtttttgaatgcatttcttcagggattattcttaaaggtagtcctggacttctggatccttgtgaaaaggatccctttgataccttggcaacaatgactgaccagcagcgtgaagacatcacatccagtgcacagtttgcattgagactccttgcattccgccagatacacaaagttctaggcatggatccattaccgcaaatgagccaacgttttaacatccacaacaacaggaaacgaagaagagatagtgatggagttgatggatttgaagctgaggggaaaaaagacaaaaaagattatgataacttttaaaaagtgtctgtaaatcttcagtgttaaaaaaacagatgcccatttgttggctgtttttc

SEQ ID NO: 241 - DNA, 186 bp, Homo sapiens
ggcctacagctgaagcccttaggtacctgtgttttgtttgggaactcggaggccctccccctcccccagctcagaccacagaggtggcaagagaagggctgaagctggaagactgttcatgagggacttgtgtgacctgctttgaaatgtgtgactctgctgagtgacgtaggctctgagatagct

SEQ ID NO: 242 - DNA, 525 bp, Homo sapiens
cagtggcttcgtgttcgactatgagtacgactgggccgggaagcccctgccgacccccatcggcaccgtccacaccgacctgccctcccagcctcagctccgggacaaaacccagccgcacagcaaaaaccaggcgttgaactccaccaacggggagctgaatgcggacgaccccacggccggccactccaacgccccgatcacagcgcctgcagaggtggaggtggccgatgaaaccaaatgctgctgtttcttcaagaggagaaagagaaaatcgctgcagcgacacaagtgaccctgggcgcgtgcagccccctgaatcttctccgtgcagccccttggggcgcgaccttgtgcgaggccctcggggcccacccacagcggcccagggccagaccctggctggaagccagaacgcagactgcaggggccgcgcctggctcaggcggccccacccccgggacgtggggtcacttccttcatgtaagactttggccgaaatttctacacctgtgtctagtcctc

SEQ ID NO: 243 - DNA, 523 bp, Homo sapiens
tcaccttccctttgtgatcagagccgtcccaggacttcaggggcttcctacctacagaatttattaagagttccccctgatcccacctccacagaatcatttcttctgaagggccccccttccatgagtgaattcatccaagggcaccggctcagcaaggaaaaaaggttaaccgtggctccaccagattgtcagcagcctgctgcctccgtaccgccacagtgctcacaactagccgggaggcaagactgcccaactgtcagtcctgacacagctctccctgaggagcagccacattccagctcccagtgcgcccctctccactgtctctccaagcctcctcacccctagtcttcatctcctgtggacgaacatctggggtggaagttttgtagccacacacaggatactgcccaagatccagcgggtgttttcttctcggttgttagatgtacaattggattaatgtccatcgttttggaagacgagaaagttgagaagaacacgaagcacagaccctgat

SEQ ID NO: 244 - DNA, 476 bp, Homo sapiens
cttggacgatgtgttcctgcccaaggacatggacggggtggagatggatgagactgaccgagaggtggagtactttaagaggttctgtttggattctgcaaagcagactcgtcagaaagttgctgtgaactggaccaacttcagcctcaagaaaaccactcctagcacagctcagtgaggccctgcccaggctgagctgcttcagggcatcctgaggccctgactgccagctgaaggcgtataatttttccctccgtgtgccccacctacccgtccaagaccctctgtgctccccaccatcctggtccaaccaaaagctgaacggatgccacactgtgctggggccccttgacctcagcagagccgcttcctggtgctacgcagcctccacactcagagcccgtggactgggctggcctaagggccagggctgatggtactgctggcccaacactgctctctttgtgtttggtttt

SEQ ID NO: 245 - DNA, 534 bp, Homo sapiens
  misc_feature (270)..(270): n is a, c, g, or t
atcagtgattcagccgactgctctttgagtccagatgttgatccagttcttgcttttcaacgagaaggatttggacgtcagagtatgtcagaaaaacgcacaaagcaattttcagatgccagtcaattggatttcgttaaaacacgaaaatcaaaaagcatggatttaggtatagctgacgagactaaactcaatacagtggatgaccagaaagcaggttctcccagcagagatgtgggtccttccctgggtctgaagaagtcaagctcnttggagagtctgcagaccgcagttgccgaggtgactttgaatggggatattcctttccatcgtccacggccgcggataatcagaggcaggggatgcaatgagagcttcagagctgccatcgacaaatcttatgataaacccgcggtagatgatgatgatgaaggcatggagaccttggaagaagacacagaagaaagttcaagatcagggagagagtctgtatccacagccagtgatcagccttcccactctctggagagacaa

SEQ ID NO: 246 - DNA, 479 bp, Homo sapiens
  misc_feature (79)..(79): n is a, c, g, or t
tccaggccagagccaacgggctgaagtcttgtgtcattgtgatccgggtcttgagggacctgtgcactcgcgtgcccancctggggtcccctccgaggctggcctctcgagctcctgtgtgagaaatccattggcacggccaacagaccgatgggtgctggcgaggccctgcggagagtgctggagtgcctggcgtcgggcatcgtgatgccagatggttctggcatttatgacccttgtgaaaaagaagccactgatgctattgggcatctagacagacagcaacgggaagatatcacacagagtgcgcagcacgcactgcggctcgctgccttcggccagctccataaagtcctaggcatggaccctctgccttccaagatgcccaagaaaccaaagaatgaaaacccagtggactacaccgttcagatcccaccaagcaccacctatgccattacgcccatgaaacgcccaatgga

SEQ ID NO: 247 - DNA, 390 bp, Homo sapiens
ggcgtggcctgaggaccacgtgttcatttccacacccagcttcaactacacaggccgtgacttccaacgcttctttgcagacctgcactttgaggaaggctggtacatgtggctgcagtcacgtgacctcctggcaggactcccagcacctggtgtggaagtatactgtctttacggcgtgggcctgcccacgccccgcacctacatctacgaccacggcttcccctacacggaccctgtgggtgtgctctatgaggatggtgatgacacggtggcgacccgcagcaccgagctctgtggcctgtggcagggccgccagccacagcctgtgcacctgctgcccctgcacgggatacagcatctcaacatggtcttcagcaacctgaccct

SEQ ID NO: 248 - DNA, 65 bp, Homo sapiens
aattaacccatttattataggccagtgatgtctcaaagagtagaggagcgtctactggtctttca

SEQ ID NO: 249 - DNA, 465 bp, Homo sapiens
cttttgctatggcctctgatattatacgattagccttttcttgcttgctttctgattccaccttttttctctgcttcttctcagacatgaccctcacctgggtattctgcaacttagtatatgtcccagaaccatcgctcttcttggaagatggaggccttcctcttggcctcttcactgaagacatttttggcgtcagacaaaggcttgccctctgctttttcaccaccccaggcagtgctcaagaaaaaagcattgaaagaagattcctaaatggcctatttagcaagctgcaaccaagagatgcacaaccctccacaaatacacattttgatttatcaacacatttctgccttggcaagtttatatctactgttcatcctatttaggtatgaaaaaggctgtaaacactcctaaaaagctgagtttcctcaatagctgtaagcagatagccagattccaaca

SEQ ID NO: 250 - DNA, 533 bp, Homo sapiens
gaagcgatccaaattctgagtctttatattttgaggatgaagatgggtttcaagaactaaatgagaatggaaatgctaaggatgagaatattcaacaaaaactttcttctaaagtattggatgatttacctgaaaactcaccaatcaatatagttcagactccaattcctattaccacctcagttcccaaacgtgcaaaaagtcagaagaagaaagctttagcagcagcccttgccacagctcaagagtattcagaaataagtatggagcaaaaaaaattacaggaagctttatcaaaagcagctggaaaaaagaataaaacacctgtgcagctagatttaggggacatgttagctgctctggaaaaacaacagcaagcaatgaaagcacggcaaattactaacaccagacctctgtcatatacagtggttactgcagcttcttttcacactaaagactctactaatagaaaacctttaaccaaaagtcagccctgtttgacatcctttaattctgtggacattgcttcttct

SEQ ID NO: 251 - DNA, 288 bp, Homo sapiens
tcctggtagctggcacaaggaggcctggacttcccctcccagcacctttctccccaacagggtgagtggttgttgctcttcaacagtatcctcccctttccggatctgctgagccggacagcagtgctggactgcacagccccggggctccacattgctgtacgcacagagatggtgaggcatagacaaccaggacactctacactctattctttattctggcctggggcacaagagcaaagagatgggccagtgactcagtctctgtctctagatatgcaagttcct

SEQ ID NO: 252 - DNA, 318 bp, Homo sapiens
aggctgaggggggaacagcgcggccaggagcccctcgggcccggcgccttgcatttcgatctccgtgatgacgatgacgcggaagaagaagggcccaagcgggagcttggtgtccggcgtcccgggggcgcagggaaggagggcgtccgagtcaacaaccgcttcgagctgataaacattgacgatcttgaggatgaccctgtggtgaacggggagaggtctggctgtgcgctcacagacgctgtggcaccagggaacaaaggaaggggtcagcgtggaaacacagagagcaagacggatggagatgacaccgagaca

SEQ ID NO: 253 - DNA, 569 bp, Homo sapiens
  misc_feature (94)..(94): n is a, c, g, or t
  misc_feature (103)..(103): n is a, c, g, or t
  misc_feature (109)..(109): n is a, c, g, or t
  misc_feature (136)..(136): n is a, c, g, or t
  misc_feature (167)..(182): n is a, c, g, or t
  misc_feature (193)..(193): n is a, c, g, or t
  misc_feature (208)..(208): n is a, c, g, or t
  misc_feature (227)..(227): n is a, c, g, or t
  misc_feature (239)..(239): n is a, c, g, or t
  misc_feature (249)..(249): n is a, c, g, or t
  misc_feature (277)..(277): n is a, c, g, or t
  misc_feature (279)..(279): n is a, c, g, or t
ccttagctactgaggcatagggagaggaagttaatttcagagccatacaaaaataagccacaaccagcttcagaattaattcccaatcccccanttccaccangggctngggagcccattcccagtgcttcccaanggccctcggggacatctaccgccaacccagnnnnnnnnnnnnnnnnctccaagcccnagcgtggggaagggnccctggagaagccctcatncctcatgggaanccacactgcnagtgggtggggaaggttgttgtcagcancncccccggctcctccaggtcctgctggctcctcgggggcagggttccctggacctcccagttctgcgccttggggccagccagtactcagagaggaggaccttctcaaccacgtacagaacacgggttttcatggctgcctttggtttggttttctgagaagataggattggattggattttgcagagggtgagaacttctctgtgcctgctcagaggcgccctagggaagggccatgtttgagttttgctttgtatgttgttttgcaagtatctgcctggtactttgatt

SEQ ID NO: 254 - DNA, 550 bp, Homo sapiens
  misc_feature (150)..(150): n is a, c, g, or t
  misc_feature (157)..(157): n is a, c, g, or t
  misc_feature (162)..(162): n is a, c, g, or t
  misc_feature (507)..(507): n is a, c, g, or t
atgaggaagcagatctccgcagggctattcagctaagtatgcaaggtagttccagaaacatatctcaagatatgacacagacatcaggtacaaatcttacttcagaagagcttcggaagagacgagaagcctactttgaaaaacagcagnaaaagcngcaanagcagcagcagcagcagcagcagggggacctatcaggacagagttcacatccatgtgaaaggccagccaccagttcaggagcacttgggagtgatctaggtgatgctatgagtgaagaagacatgcttcaggcagctgtgaccatgtctttagaaactgtcagaaatgatttgaaaacagaaggaaaaaaataatacctttaaaaaataatttagatattcatactttccaacattatcctgtgtgattacagcatagggtccactttggtaatgtgtcaaagagatgaggaaataagacttttagcggtttgcaaacaaaatgatgggaaagtggaacaatgcntcggttgtaggactaaataatgatcttccaaatattagccaaa

SEQ ID NO: 255 - DNA, 383 bp, Homo sapiens
agctgcagccaatgctaatgcttccacttctgcttctaatactgtcagtggaactgttccagttgttcctgagcctgaagttacttccattgttgctactgttgtagataatgagaatacagtaactatttcaactgaggaacaagcacaacttactagtacccctgctattcaggatcaaagtgtggaagtatccagtaatactggagaagaaacatctaagcaagaaactgtagctgattttactcccaaaaaagaagaggaggagagccaaccagcaaagaaaacatacacttggaatacaaaggaagaggcaaagcaagcttttaaagaattattgaaagaaaagcgggtaccatcgaatgcttcatgggagcaggcta

SEQ ID NO: 256 - DNA, 534 bp, Homo sapiens
gctcagcatgccttgaggggaggaggtggtggccgtgggttcctgatgtcggtgcaggagctgaaggtgagtggagtgctgccaagaatatgcccgactccccatgacaagacagaactttgtaacaaacagtaccaatttattttggccgtgggtttttgctttttttccagttgatgactttgtgaacattcccaggtattggagcctctgtggccttaaatgtggctcagtggagggagacccagcatagccaggccagtatggagcacctcacgcacagctctcagaagctgcaggcggacgaacatctgaccaaagaggtgtggtcgaggctcctgaaagagaaagggcctgctggtctcatcctctgcttcctttgcctttaccctatacctctctgcacgtcccaccccgttttgctgtgtgctcacccccaggatgtgtacccggttgtagtaggagctgaaatccatgctgagctgtaccaggaacttgcatatctagagacagagactgagtcactggcccatc

SEQ ID NO: 257 - DNA, 275 bp, Homo sapiens
agaaggtccagcatgttgcatctctgcattatcctatatcataaaagaagcataagttatcatggtgttgggtaaattagcgaaatcaaccgcttcctaagtttaagggaaaagttatttttaaaaacaacttaataaaaacttacactcttatacaagagtgtatttccccttaattaggatgcatgttgattaaactcgagatacagctttttgcagtatggtgggttggttttggtgtaacatcttcaacatgtcacactggctatcaaaga

SEQ ID NO: 258 - DNA, 394 bp, Homo sapiens
gcgatgcagaaatgaaccaccggagttcaatgcgagttcttggggatgttgtcaggagacctcccattcataggagaagtttcagtctagaaggcttgacaggaggagctggtgtcggaaacaagccatcctcatctctagaagtaagctctgcaaatgccgaagagctcagacacccattcagtggtgaggaacgggttgactctttggtgtcactttcagaagaggatctggagtcagaccagagagaacataggatgtttgatcagcagatatgtcacagatctaagcagcagggatttaattactgtacatcagccatttcctctccattgacaaaatccatctcattaatgacaatcagccatcctggattggacaattcacggccctt

SEQ ID NO: 259 - DNA, 331 bp, Homo sapiens
  misc_feature (38)..(64): n is a, c, g, or t
  misc_feature (267)..(267): n is a, c, g, or t
tccgagccatgtgagccccctgatgccaccgagcaggnnnnnnnnnnnnnnnnnnnnnnnnnnnaggctgtggcggacactctcggggttgtctgcaggagagcaagccaggaggacatgggcctggacgacacggcctcgcagcaaagtgtgtcagacgagcagtgacgggcgtgcggccgggcggggaggctggctcccccacacctcccacctgcattgctctccctcgtgctccccaaatcaccacaaccaaccaataccgcnatccatgagggactcctcctgtggaaaaggagagctgttccagaacacagaactgatctcaggt

SEQ ID NO: 260 - DNA, 465 bp, Homo sapiens
tccttcgctgccaccaaatttggctccactaagatgaagaaggggggcggggcagcaagtggtgggggtgtagccagcagtggggcgggtggccagcagccacaccagcagcctcgcatggcccgctcacccaccaacagcctgctgaagcacaagagcctctctctgtctatgcattcactgaacttcatcacggccaacccggcccctcagtcccagctctcacccaatgccaaggagttcgtgtacaacggtggtggctcacccagcctcttctttgatgcggccgatggcagggcagcggcaccccaggcccgtttggaggcagtggggctggcacctgcaacagcagcagctttgacatggcccaggtatttggaggtggtgccaacagcctcttcctggagaagacacccctttgtggaaggcctcagctacaacctgaacaccatgcagtatcccagc

SEQ ID NO: 261 - DNA, 331 bp, Homo sapiens
tgaccagaaagcaggttctcccagcagagatgtgggtccttccctgggtctgaagaagtcaagctcattggagagtctgcagaccgcagttgccgaggtgactttgaatggggatattcctttccatcgtccacggccgcggataatcagaggcaggggatgcaatgagagcttcagagctgccatcgacaaatcttatgataaacccgcggtagatgatgatgatgaaggcatggagaccttggaagaagacacagaagaaagttcaagatcagggagagagtctgtatccacagccagtgatcagccttcccactctctggagagacaa

SEQ ID NO: 262 - DNA, 416 bp, Homo sapiens
  misc_feature (292)..(292): n is a, c, g, or t
ctctgagctcactttgtgcactgagtgatgtcaccatttctacctgccgtgtatcagcgaaggttgggactcgactggtgtttgatcactatgggaaaatcatccagaaaaccccctacccccgccccagagggatgacagtcagcgtgaagcagttattttctacgctacctgtgcaccataaagaatttcaaaggaatattaagaagaaacgtgcctgcttccccttcgccttctgccgtgattgtcagtttcctgaggcctccccagccatgcttcctgtacagcctgnagaactgactcctagaagtaccccaccccacccctgctccttggaggacaacgtgatcactgtattcagctctgtcaagaatggtccaggttcttctagatgatctgcacaaatggctcctctc

SEQ ID NO: 263 - DNA, 390 bp, Homo sapiens
  misc_feature (294)..(294): n is a, c, g, or t
  misc_feature (311)..(311): n is a, c, g, or t
  misc_feature (365)..(365): n is a, c, g, or t
acagcaactggatgatgctcgcaacaaagctgacaatcaagaaaaagcaatacttaatattcaagccagatgtgatgctagagtacaaaaccttcaagctgagtgcagaaagcaccgtcttttactagaagaagacaataaaatgttggtcaatgaactgactcattcgaaagaaaaagaatgccaatatgaaaaagagaaagcagaaagagaagtagctgtgagacagcttcaacaaaaacgagatgatgtcttaaacaaaggatcagcaacaaaagctctgctggatgcttnatcgcgtcactgcaccnatttagaaaatgggatgcaggattcaaggaagaaattagaccagatgagaagtnaagtatgtatgcaactttgcacacc

SEQ ID NO: 264 - DNA, 480 bp, Homo sapiens
ggaaaggcttttctgaggagcacaatacttgggaacctgagaaaaacttggattgccctgagctaatttctgaatttatgaaaaagtataagaagatgaaggagggtgaaaataataaacccagggagaagtcagaaagtaacaagaggaaatccaatttctcaaacagtgccgatgacatcaaatctaaaaaaaagagagagcagagcaatgatatcgctcggggctttgagagaggactggaaccagaaaagatcattggggcaacagattcctgtggtgatttaatgttcctaatgaaatggaaagacacagatgaagctgacctggttcttgcaaaagaagctaatgtgaaatgtccacaaattgtgatagcattttatgaagagagactgacatggcatgcatatcctgaggatgcggaaaacaaagagaaagaaacagcaaagagctaaaggaggggatggtctctgtcatttc

SEQ ID NO: 265 - DNA, 511 bp, Homo sapiens
  misc_feature (42)..(42): n is a, c, g, or t
agtaacctttgcctgaaggttctgtgaactccttaagcgttngaatgtaaatacttctccccaccccgaataagcgtattcttctgggaaaaggcaatgaaaaaagaaatgaactttcttctcagaccttgaaaagtttttagtgcatagtataatttttttcatatgatagactgagctttatgcacacaggtggactgggtggttatggatcaggagacagtgaagatgagaggagtgacagaggatctgagtcatctgacactgatgatgaagaattacggcatcgaatccggcaaaaacaggaagctttttggagaaaagaaaaagaacagcagctattacatgataaacagatggaagaagaaaagcagcaaacagaaagggttacaaaagagatgaatgaatttatccataaagagcaaaatagtttatcactactagaagcaagagaagcagacggtgatgtggttaatgaaaagaagagaactccaaatgaaaccacatcagt

SEQ ID NO: 266 - DNA, 308 bp, Homo sapiens
  misc_feature (73)..(73): n is a, c, g, or t
  misc_feature (84)..(84): n is a, c, g, or t
  misc_feature (86)..(86): n is a, c, g, or t
  misc_feature (98)..(98): n is a, c, g, or t
  misc_feature (119)..(119): n is a, c, g, or t
  misc_feature (131)..(131): n is a, c, g, or t
  misc_feature (137)..(137): n is a, c, g, or t
  misc_feature (140)..(140): n is a, c, g, or t
  misc_feature (159)..(159): n is a, c, g, or t
  misc_feature (161)..(161): n is a, c, g, or t
  misc_feature (172)..(172): n is a, c, g, or t
  misc_feature (250)..(250): n is a, c, g, or t
gcactttgggaagctgaggcggtggatcacctgagctcaggagttcgagaccagcctggccaacatgttgaanccatgtctctncntaaaaatacaanaattagccagtcatggtggcnggtgcctgtaancccagnttnctccggaggctgaggtggnanaatcgcttgancccaggaggtggaggttgcagtgagccaagatagcaccactgcactccagcctgggcgacaaagcaagactctttctnaaaaaaacaaaaatgaataaacaaaaaaactatgagacagaaaagatgggtttttgtt

SEQ ID NO: 267 - DNA, 434 bp, Homo sapiens
gaatgagtcagccagaggccggaaaaaatcccgttctcagtccccaaaaaaggatattgcaagagaaaggaggcaatctcagtctcggtctccaaaaagggatactactagggaaagcagaagatctgaatcactgtccccaagaagagaaacttctagagagaacaaaagatctcagccaagagtgaaagattcttccccaggagaaaaatccaggtcccagagcagagaacgagaaagtgatagagatgggcagaggagagagagagaaaggagaaccagaaagtggtctaggtccagatctcattctaggtccccctcaagatgtagaacaaaaagtaagagttcatcatttggtagaattgacagagatagttactctccccggtggaagggaagatgggcaaatgatggttggagatgtccacgaggaa

SEQ ID NO: 268 - DNA, 481 bp, Homo sapiens
tcacccttcttgtatggccattttgtctgtgtgatgcgaatataagcttgtcctttgtcaaaggtttttctttccatcttctcaatgtccttttctttaatttgagatcgcttctcaggtttttctttactttcctttatatgcttttcttgtttttcaatgtctatttccttttccactaaatgaagccctatagattcctcaatggcactcataccccaaagaagtaaattctcgctttcctttttaatcttgtctcgttcctctttaaagttcctctcttttgacacatgcttttccttggttgatttatcatctttgatgtttttttccaattttgattttttttctaatgttaaggattcatgttccatatttaaaaagagatcttcagtttcatcacttttaaaaaaattctctttcccaaaattctctatcaaattccacactcctctgcagttctttggcactatccttagtt

SEQ ID NO: 269 - DNA, 516 bp, Homo sapiens
ggagcacaaatcttcccacaaggacaaacgccccgtggatgccaagagtgatgagaaggcctctgtggtgagcagagagaaatcacacaaggccctctccaaagaggagaaccgaaggccaccctcaggggacaatgcaagggagaaaccgccctctagtggcgtaaagaaagagaaggacagagagggcagcagcctgaagaagaagtgtttgcctccctcagaggccgcttcagacaaccacctgaaaaagccaaagcacagagacccagagaaagccaaattggacaaaagcaagcaaggtctggacagctttgacacaggaaaaggagcaggagacctgttgcccaaggtaaaagagaagggttctaacaacctaaagactccagaagggaaagtcaaaactaatttggatagaaagtcactgggctccctccctaaagttgaggagacagatatggaggatgaattcgagcagccaaccatgtcttttgaatcctacctcagctatgacca

SEQ ID NO: 270 - DNA, 107 bp, Homo sapiens
gaggtgttgccgtcactgtattaagtcgatgttgggaaacgttttaacatctggagcctttgtgggtggaaatatgtctccagttacaactccgcagtggatgtgaa

SEQ ID NO: 271 - DNA, 405 bp, Homo sapiens
tttacaaccgctacataatgaaaagttttttgtttgaaccagtagtgaaagcatttctcaacaatggatcccgctacaatctgatgaactctgccataatagagatgtttgaatttattagagtggaagatataaaatcattaactgctcatgtaattgaaaattactggaaagcactggaagatgtagattatgtacagacatttaaaggattaaaactgagatttgaacaacaaagagaaaggcaagataatcccaaacttgacagtatgcgttccattttgaggaatcacagatatcgaagagatgccagaacactagaagatgaagaagagatgtggtttaacacagatgaagatgacatggaagatggagaagctgtagtgtctccatctgacaaaacta

SEQ ID NO: 272 - DNA, 340 bp, Homo sapiens
gtgtgctgttgggtctttcagctcctcgggtggtagggaggacacaggctggggaggtggcagtgttgggtggagtccagctcagggccccaccctctcccctgcagggtacctgtcagtaaacctaggggtggggtgaggacacctgagggcctcccgtgtggccagcattgctgttgctgacttattgcccaatgagggggctgtgcttaggtaggggctgctatccactctggaaattaagtcagaaagatgagtgtaatctggtacccaggatctatagggtcccagagacggacattccttacctcaaatgctgcctgataaactggctctcttt

SEQ ID NO: 273 - DNA, 498 bp, Homo sapiens
cagcagcagcagcagatcctgcggcagcagcagcaacagcaacagcagcagcagcagcagcagcaacagcaacagcagcagcagcaacagcaacaacagcaacaccagcagcaacagcagcaacaggcggctcctccccaaccccagccccagtcccagccccagttccagcgccaggggcttcagcagacccagcagcagcaacagacagcagctttggtccggcaacttcaacaacagctctctaatacccagccacagcccagtaccaacatatttggacgctactgagccacctggaggaactgcttgtgcactggatgtggccccaccctttcctcttaattcccaatcccattcctgggctagcaccagtagtggttggggccctcccctcaggctccatttttaataagtttttagtatttttgttaatgtgaggcattgagctgttgggttttgtatattatttatatagagaccccagagctgttgcac

SEQ ID NO: 274 - DNA, 515 bp, Homo sapiens
gatatcattcataagttcccagtcccagacagttttttcaacttttttagtctttggtttcttttcttcttcttcttcctctactgcagcttcatcatcagattcttctttctcttctttggctgcttcttcttcctccatgggctcctcaacagtttcagtcttgctgctccatacataaataggaaagtttatgaacgatatcattcataagttcccagtcccagacagttttttcaacttttttagtctttggtttcttttcttcttcttcttcctctactgcagcttcatcatcagattcttctttctcttctttggctgcttcttcttcctccatgggctcctcaacagtttcagtcttgctgctccatacataaataggaaagtttatgaacgatatcattcataagttcccagtcccagacagttttttcaacttttttagtctttggtttcttttcttcttcttcatcagaaccaacatcttcaatttcaggtttgtcttccgactc

SEQ ID NO: 275 - DNA, 509 bp, Homo sapiens
ggaacaggatacttgcaatcttgaagaggaagagcgaaaagcaagtaccaaaatcaaagaaataaatgttcaaaaagcgaaacttgttaccgaattaacaaacctaataaagatttgtacttctttgcatatacaaaaagtagatttaattctccaaaatactacagtgatctctgagaagaacaaattagaatcagattatatggccgcatcttcacaactccgtcttacagagcaacatttcattgaattggatgaaaatagacagagattattgcagaaatgcaaggaacttatgaaaagagctaggcaagtatgtaacctgggtgcagagcagactcttcctcaagaataccagacacaagtacccaccattccaaatggacacaactcctcactccccatggttttccaagaccttccaaacacattggatgaaattgatgctttattaactgaagaaagatcaagagcttcctgcttcacgggactgaatcctacaattgttc

SEQ ID NO: 276 - DNA, 531 bp, Homo sapiens
gaggacggtcacgaagccgagagagaagaacaccaccaggaagatcaagaagtaaagataggaggagaaggaggagagactcacggagctcagagagagaagaaagtcaaagcagaaacaaagacaaatacagaaaccaagagagtaagagctcacacagaaaagaaaattctgagagtgagaaaagaatgtactctaaaagtcgtgatcataatagctcaaataacagcagggaaaaaaaggctgatagagatcaaagtcccttctcaaaaataaaacaaagcagtcaggacgatgaattaaagtcctccatgttgaaaaataaggaggatgagaagatcagatcctcagtggaaaaagaaaaccaaaaatcaaaaggtcaagaaaatgaccatgtacatgaaaaaaataaaaaatttgatcatgaatcaagccctggaacagatgaagacaagagcggatgagtgagttatataaacttacttccattctgtttcggattttaagtttgagagacttgctaatgaatct

SEQ ID NO: 277 - DNA, 370 bp, Homo sapiens
ccaggagttcataccagtctaggggcaacatggtgagaagttgtctctactaaaagtaaaaagaattagctgggcatggtggcatgcacctgaggtcaggtcccagcgacttgggaggttgagaggttggaggattgcttgagcccaggagatgaggctgcaatagcatgatcacgccgctgcacttcagcctgggtgacagagcgagagcctgcctcaaaaaacaaatatgtttcaacttttttataataaatatgttcattttgcaactagcaaaaaaaaaaaaaaaaaaaaacccgaaagaaaaatactcaggctggtctaggtgaagtggtgtttacagtaactgatcaccaccagttacagattt

SEQ ID NO: 278 - DNA, 558 bp, Homo sapiens
  misc_feature (341)..(341): n is a, c, g, or t
agagcgccggctgcaaagcgagcgcgagtgtcgacgcgtgcgacgcactaaattgtgccgcgctcgcgcccgccagaccatgtcctcctggggaaaaagtttccctagtccccccagcaccgcgccccaccctacgccccgctggaaaaaaaacagcaacataaaatcctaggcttgaacattctgtgcgtcccaaatttctaatgtcctcggcctgcccggtttgccgaagggagccgagtgtcgaagagaagtcgggaaaaggtaagttgtgcagacacttggggaagtttcaaggagaccgccagctcaagatggaaaccgcggcccgggcgctaagnacgggcttcagctcccgctggcaaaaagagaaagtcgagcccgccttcctgcccaacaaaaaacaacaacatgacaacaagaaccccggagggagtggaatgagtgacgtcacagccgcgctctgaggctgacaaaggagggggcgcgcccctcccgctctgcgcccgcgcggccccggagagggggcgcctgaagcgccgggtagggaagtcagcc

SEQ ID NO: 279 - DNA, 509 bp, Homo sapiens
  misc_feature (32)..(32): n is a, c, g, or t
  misc_feature (158)..(158): n is a, c, g, or t
  misc_feature (176)..(176): n is a, c, g, or t
  misc_feature (178)..(178): n is a, c, g, or t
  misc_feature (311)..(311): n is a, c, g, or t
  misc_feature (318)..(318): n is a, c, g, or t
  misc_feature (321)..(321): n is a, c, g, or t
  misc_feature (359)..(359): n is a, c, g, or t
tattgaaactgcacctgtaatcccagcacttngggaggctgaggacagaggattgcttgagcccaggagttcgagagcagcctgggcagcaaagtgagaccccatctctactaaaaatttaaatgtatttattaaaactgttctctagaagctttggnactgaatcccaaaagtgntnataagttcaaaagcaaaagtattgtaatttcaacaacaaaaaatgtatttctttatgtaatcttgaaattattaaaagtccttttagcttctagcacatatttgtacaaagagtttaaggaatggtggctggnttggttngtnttttaaaaatgtttactgacgaggccgggcgtggtggntcacccctgcaatcccagcactttggagggccgaggcaggcagatcacaaggtcaggagttcaagatcagcctggccagtatggtgaaaccctgtctctactaaaaatagaaaaattagccatgcgaagtagcaggtgcctgtagttcca

SEQ ID NO: 280 - DNA, 421 bp, Homo sapiens
  misc_feature (253)..(253): n is a, c, g, or t
aacctagtggatgttgtccctcttgactgcagtgtcacagggggaaacccccttggccatcaaaccaggggcaaaggggcaaacagagaaacccaggataccccagccctttgacagttcaacggggagaagcctgtaggcagagagaagtggtgtcaaggagttggtctttttcattcctcgtcctccaggtcctcctccctttgccccagctcaaggccctggcccttctggatactggcagggctgtgcntaagagtggaagggataatgcatgtgccactcaaggggctgttagcaccgcatatctccaaagagcacaatcaacactggagcgcacatctcactgcagacaggtcagtggcgttcctgccctgcacgcgattgcttagcagtgaggtgagctcatggctctcttaca

SEQ ID NO: 281 - DNA, 228 bp, Homo sapiens
  misc_feature (61)..(64): n is a, c, g, or t
aagcagatgttatggaagcaagttcacaattacccaatgttcaacctccttatggatattnnnncctatatgtttgcatgtgtgaatcagactgctgtatatgaggagcttgaagatgaaacacgaagactctgtgatgtcagaccttttcttccagttctcaaattagtgacaagaagttgtgacccaggggaaaaattagactcaaaaattggagtccttatagga

SEQ ID NO: 282 - DNA, 531 bp, Homo sapiens
ggtgtgctgggacccgagtaggagctaggactagccaggacccgcagccgcctcgtcacctccagttgggtgcctctgggttcccactggctctgcccaggtggggtggggtggcccaggcagcagaaggttccctgaggtcccagagcctgttccgttggccctgggccgaggcccacaggtgctgcccttgctgctgctggtcgggcacccaagtgcgtgaggggcttcagcctgtcccggggttgcctgaggcagagcaagacgggttctcacccctgacttctggaggcttcccttgaagctctgtgcaaaaggtgggaaacagagctggacctgcaggggtggtcccgccacaaccctgcgtgtggaccctggcaggggggggtgccaggcccctggaaagcaggggttaccgttacgaggctgtggtccggggcaagccaagtacgaagcagcagccatcgcgggctgcatcatcccccagccaggtccccaccaggcctgtctcccagcgtttgtctaataaac

SEQ ID NO: 283 - DNA, 447 bp, Homo sapiens
gcggcaaagcttttaaccgatcctcaaaacttactgaacataagtacattcatactggagagaagctgtacaaatgtgaagaatgtgacaaggcctttaacctgtcctcaacgcttactaaacataaggtaattcatactggagagaaactgtacaaatgtaaagaatgtggtaaagcttttaaacagttctcacaccttgctatacataatataattcatactggagagaaactctacaaatgtgaagaatgtggcaaagcttttaactcatcctcaaaccttactgcacataagaaaaatcgtactggagagaaaccctacaaatgtgaagaatgtggcaaagctaacctatcatcaacccttactccacataagacaattcatatttgagagaaaccctgcaaatgtgaagaatgtggcaatgcttgtaactaaatctcaaact

SEQ ID NO: 284 - DNA, 241 bp, Homo sapiens
ggatggccagggtacctggggactcaggctgctgccagttctgctcaccaccatccgtgcttggcacagaagtagctgcatagaaagagcactggatttgaagtcagaagacctggttcttgaaccagcctgtcaaccagttgtatgactttaaacaaggcatctcacctcttttcatcttgttttcttccaataatgttagagttcatgtaatcacattctctagaaccatttagtttgt

SEQ ID NO: 285 - DNA, 348 bp, Homo sapiens
aattgcctaagaattatgacccaaaagttaccccagatccagaaagatggctgccaatgcgagaacgttcttactaccggggaagaaagaagggtaaaaagaaggatcagattggaaaagggacccagggagcaactgcaggagcttcatctgaactggatgccagtaaaactgtgagcagcccacccacctccccaagacctggcagtgctgcaacagtatctgcctctacaagtaacatcatacccccaagacaccagaaacctgcaggggctccagcaacaaaaaagaaacagcaacagaaaaagaagaaaggtggaaaaggtggctggtgatgagaatattctt

SEQ ID NO: 286 - DNA, 362 bp, Homo sapiens
acaggtgatttacatcccctttgctgtcctcccccggtaccaaggcagggagcctccggaggagccggccctgctggccacgcaggggccagactccagcctgtttccccagccctgcaggtcttccttctgtgggaagcttcctagcaagatggcttggagtcctggtccccctcctccctggccctctcgttcgtttctgtttctgtttacacgttggagtggggtcctccgtgggcggcggcgcgccctgccccgggtgtcgtccggcctcttgtgctcgagcccctttccgagttggactcgaccatccctcaccccaccaaggaccacactgtgaagtgataactgccttgaacccc

SEQ ID NO: 287 - DNA, 421 bp, Homo sapiens
  misc_feature (162)..(163): n is a, c, g, or t
  misc_feature (165)..(166): n is a, c, g, or t
  misc_feature (168)..(174): n is a, c, g, or t
  misc_feature (176)..(177): n is a, c, g, or t
  misc_feature (179)..(180): n is a, c, g, or t
  misc_feature (182)..(184): n is a, c, g, or t
  misc_feature (197)..(197): n is a, c, g, or t
  misc_feature (237)..(237): n is a, c, g, or t
  misc_feature (239)..(239): n is a, c, g, or t
  misc_feature (252)..(253): n is a, c, g, or t
  misc_feature (305)..(305): n is a, c, g, or t
  misc_feature (320)..(331): n is a, c, g, or t
  misc_feature (373)..(373): n is a, c, g, or t
  misc_feature (375)..(375): n is a, c, g, or t
  misc_feature (378)..(378): n is a, c, g, or t
  misc_feature (384)..(385): n is a, c, g, or t
  misc_feature (392)..(393): n is a, c, g, or t
gacttcttgaggtcagaatggcggcagtggagcatcgtcattcttcaggattgccctactggccctacctcacagctgaaactttaaaaaacaggatgggccaccagccacctcctccaactcaacaacattctataattgataactccctgagcctcaagnnanntnnnnnnngnntnntnnntccccttccaccntcagctctaccctcagcggatgataatctcaagacacctncngagtgtctgctcnntccccttccaccctcagcggatgataatctcaagacacctcccgagtgtctnctcactccccttccnnnnnnnnnnnnaccctcagctccaccctcagcggatgataatctcaagacacntnccnagtgtnnctgctcnntccccttccaccctcagcggatgataat

SEQ ID NO: 288 - DNA, 485 bp, Homo sapiens
  misc_feature (79)..(79): n is a, c, g, or t
gaagggcgctgttttcgacaggtgtgcaggtttcggcacatggagattgataaaaaacgcagtgaaattccttgttatngggaaaatcagccaacaggatgtcaaaaattaaactgcgctttccatcacaatagaggacgatatgttgatggccttttcctacctccgagcaaaactgtgttgcccactgtgcctgagtcaccagaagaggaagtgaaggctagccaactttcagttcagcagaacaaattgtctgtccagtccaatccttcccctcagctgcggagcgttatgaaagtagaaagttccgaaaatgttcctagccccacgcatccaccagttgtaattaatgctgcagatgatgatgaagatgatgatgatcagttttctgaggaaggtgatgaaaccaaaacacctaccctgcaaccaactcctgaagttcacaatggattacgagtgacttctgtccggaaacctgcagtcaa

SEQ ID NO: 289 - DNA, 462 bp, Homo sapiens
  misc_feature (43)..(43): n is a, c, g, or t
  misc_feature (76)..(76): n is a, c, g, or t
  misc_feature (300)..(300): n is a, c, g, or t
tttgccgacctacctcaggttgaaacttttggctttcgggggnaagctctgagctcactttgtgcactgagtgatntcaccatttctacctgccacgtatcggcgaaggttgggactcgactggtgtttgatcacgatgggaaaatcatccagaaaaccccctacccccaccccagagggaccacagtcagcgtgaagcagttattttctacgctacctgtgcgccataaggaatttcaaaggaatattaagaagaaacgtgcctgcttccccttcgccttctgccgtgattgtcagttncttgagggctccccagccatgcttcctgtacagcctgcaaaactgactcctagaagtaccccaccccacccctgctccttggaggacaacgtgatcactgtattcagctctgtcaagaatggtccaggttcttctagatgatctgcacaaatggttcctctc

SEQ ID NO: 290 - DNA, 210 bp, Homo sapiens
  misc_feature (125)..(148): n is a, c, g, or t
  misc_feature (153)..(154): n is a, c, g, or t
acatgtttcccatgacctgtgggctctgcagatggacctctctccgctagagatgcccttctcccaaatggcttccctcctggaaggcccagcctgagtcctcgtctcctttccagtgcttctgnnnnnnnnnnnnnnnnnnnnnnnngaccnncacagcactttgtgtctcgctttgagcacttgccactctggctggtgctgctgcca

SEQ ID NO: 291 - DNA, 501 bp, Homo sapiens
aatctggagattcttctgggtgtataaaaccccctaaatcaccactttccccagaattaatacaagtcgaggatttgacgcttgtatctcagctttcttcttcagtgataaataaaactatgcctgatgttgcacatttgccacttgagaagctgggaccctgtctccctcttgacttaagtcgtggttcagaagttacagcaccggtagcctcagattcctcttaccgtaatgaatgtcccagggcagaaaaagaggatacacagatgcttccaaatccttcttccaaagcaatagctgatggaagaggagctccagcagcagcaggaatatcgaaaacagaaaaaaaagtgaaattggaagacaaaagctcaacagcatttggtatcaggagttgggatttctcagcactgctaatgaagatcccctcttatagtccaataagcttatcaggacttccagagtcatgacatgaacagtttaattgaacccatccactct

SEQ ID NO: 292 - DNA, 388 bp, Homo sapiens
gagaaagaacgggagcgggaacgagaacgggatagggaccgtgaccggacaaaagagagagaccgagatcgggatcgagagagagatcgtgaccgggatagagaaaggagctcagatcgtaataaggatcgcagtcgatcaagagaaaaaagcagagatcgtgaaagggaacgagagcgggaaagagagagagagagagaacgagagcgagaacgagaacgggagcgagagagagagcgagagagggaacgggagcgagaaagagaaaaagacaaaaaacgggaccgagaagaagatgaagaagatgcatacgaacgaagaaaacttgaaagaaaactccgagagaaagaagctgcttatcaagagcgccttaagaattgggaaatca

SEQ ID NO: 293 - DNA, 225 bp, Homo sapiens
ttcccatccacataccaagctgatgaggatcccatcgttcttccccagtcctgaggagcccccctcgccatctgcaccttccatagccaaatcagggtcattggactcagaactttcagtgtccccaaaaaggaacagcatctctcggacacacaaagataaggggccttttcacatactgagttcaaccagccagacaaacaaaggaccagaagggcagagcca

SEQ ID NO: 294 - DNA, 578 bp, Homo sapiens
gtgtgccccaaaacatgcgagaactttcgttgtctttgtacaggtgaaaaggggaccgggaaatcaactcagaaaccattacattataagagttgtctctttcacagagttgtcaaggattttatggttcaaggtggtgacttcagtgaaggaaatggacgaggaggggaatctatctatggaggattttttgaagacgagagtttcgctgttaaacacaacaaagaatttctcttgtcaatggccaacagagggaaggatacaaatggttcacagttcttcataacaacgaaaccaactcctcatttagatgggcatcatgttgtttttggacaagtaatctctggtcaagaagttgtaagagagattgaaaaccagaaaacagatgcagctagcaaaccgtttgcggaggtacggatactcagttgtggagagctgattcccaaatctaaagttaagaaagaagaaaagaaaaggcataaatcatcatcatcttcctcctcctcatctagtgactcagatagctcaagtgattctcagtcctcttctgattcctctgattccgaaagtgctactga

SEQ ID NO: 295 - DNA, 556 bp, Homo sapiens
gtgatgacttgtaactgtaatcccagttataggggaggctgaagcaggaggatcacttgaggccaggagtttgagaccagcctgggcaacatagtgagatcccatctcaaaaaacattatttttaaaattagcctggtggctcacgcctgtaatcccagcactttgggaggccgaggtggccagatcacctgaggtcaggagttcgagaccaccctggccaacatggtgaaaccccatctctacagttttgtaaaaatacaaaaattacctgggcctggtgcacaggcctgtagtcccagctacttgggaggctgaggcaggagaattgcttgagcccaagaggtggaggttacagtgagcagagatcacaccactgcactccagcctgggtggcagagcaacacttcgtctcagaaaaaaaaaaaaaaaccaaaaaccaaaaagccaagtgtggtggtgtgcacctatagtcccagctactcaggaagctgagacaagaggatcaattgagcccaggagttcaaagctgtagtgagctgtcattgtgccactatc

SEQ ID NO: 296 - DNA, 312 bp, Homo sapiens
cagaaggagctctgcctgtatgtcccagtcaaccacatggatggtcgttgtgaaagttttaacttcctgcagagttaccgagtgctcagcgattgagctttgaccacacccgtgtttgttcctagtctgttcccagccataagcatctccacaagccctctgtggcttgtgtggcctgatgtccatggccaccaagggcctctcaccatacgcttctccactcaacctttggagagacacggaccaccaaaggcttgatttttcttcatcctacattatattcaaaacaaacaggctgggtgccgtagctca

SEQ ID NO: 297 - DNA, 442 bp, Homo sapiens
  misc_feature (78)..(115): n is a, c, g, or t
  misc_feature (270)..(270): n is a, c, g, or t
gtgcagactgtgttggtggcggtaattttgtccatcaaatgaatatgtgtgaaaacattccctcctttggccctacannnnnnnnnnnnnnnnnnnnnnnnnnnnnnnnnnnnnnggtcagaatggcggcagcagagcatcgtcattcttcaggattgccctgctggccctacctcacagctgaaactttaaaaaacaggatgggccaccagccacctcctccaactcaacaacattctataactgataactccctgagcctcaagacanctgcggagtgtctgctctatccccttccaccctcagcggatgataatctcaagacacctccgagtgtctgctcactccccttccaccctcagctccaccctcagcggatgataatctcaagacacctcccaagtgtgtctgctcactccccttccaccctcagtggatgata

SEQ ID NO: 298 - DNA, 504 bp, Homo sapiens
gcagttctctccctgaaaacacagtacaggttgagtcaaatgaggtcatgggtgcaccagatgacaggaccagaactccccttgagccatccaactgttggagtgacttagatggtgggaaccacacagagaatgtgggagaggcagcagtgactcaggttgaagagcaggcaggcacagtggcctcgtgtcctttagggcatagtgatgacacagtttatcatgatgacaaatgtatggtagaggtcccccaagagttagagacaagcacagggcatagtttagagaaagaattcaccaaccaggaagcagctgagcccaaggaggttccagcgcacagtacagaagtaggtagggatcacaacgaagaagagggtgaagaaacaggattaagggacgagaaaccaatcaagacagaagttcctggttctccagcaggaactgagggcaactgtcaggaagcgacaggtccaagtacagtagacactcaaaatgaacccttag

SEQ ID NO: 299 - DNA, 559 bp, Homo sapiens
  misc_feature (127)..(129): n is a, c, g, or t
  misc_feature (131)..(135): n is a, c, g, or t
  misc_feature (137)..(140): n is a, c, g, or t
  misc_feature (143)..(145): n is a, c, g, or t
  misc_feature (157)..(159): n is a, c, g, or t
  misc_feature (161)..(163): n is a, c, g, or t
  misc_feature (165)..(165): n is a, c, g, or t
  misc_feature (167)..(167): n is a, c, g, or t
  misc_feature (351)..(351): n is a, c, g, or t
  misc_feature (373)..(373): n is a, c, g, or t
  misc_feature (464)..(464): n is a, c, g, or t
agaaccgtgagagaagttggcacaaaggagttatgggacaaagggtccaagataggcagaaaagaaaatgttgccagttgatggggaagaaaggaagtcggagggctcagacactgagggggacagnnnannnnnannnncannntctccatgtgcnnngnnntncntcatctgctaccctgaaggatctggaggtaggaggctctgggcggaggtgcagtgaccccgcaggccagccctccaacctcctcccgcagcggggactgggtgcccctctgccagctgagacagcccacacacaacccagccctaatgatcgttctctctacctctcccccaagtcctcctccncctcctcctctctgcatgcgcntcagagcccgtgccaagaacaagcagcagtcctgaactcgaggtccataaaaatcagtcgactgaatgacaccatcaaatctttgaaacancagaagaaacaagtggaacatcagctggaagaagaaaagaaagcaaacaatgagaaacagaaagctgaaagggagctagagggtcaaatccagag

SEQ ID NO: 300 - DNA, 453 bp, Homo sapiens
gctgctcagacaaatttgacactactccaagtcaacaactggttcatcaatgccagaagacgaattcttcagccaatgttggattcaagttgttcagagacccccaaaacaaagaaaaaaactgctcagaaccggccagttcagaggttttggcctgattctattgcatcaggagtcgcacagccaccgccgagcgagctcaccatgtcggaaggagctgttgtcaccatcaccacgcccgtgaacatgaacgtggacagccttcagtctctgtcctcggacggggccaccctggcggtgcagcaggtcatgatggcagggcagagcgaggacgagtctgtggacagcacagaggaggatgcgggtgccctggcccctgcccacatcagcgggctggtcttggagaacagtgactccctgcagtaggggcaggagcagacgcacctgactttt

SEQ ID NO: 301 - DNA, 341 bp, Homo sapiens
  misc_feature (96)..(96): n is a, c, g, or t
  misc_feature (158)..(158): n is a, c, g, or t
ggctgtcagccttcaattaataccttaattaatctgaccagttttcaaatgtctggagccttatcaccagctgtttcttcctcaaggaatacatanccaccacttacaagctggctgttgaaatgagagcggtttcttacagtctacccggcgttgtngcacatgcctactggaggctgaggtgggaggatctcttgaactgcaggggcttaaggctgtagtgagccaggatcgcacccctgcactccagcctagacaatggagcaaggtggacggatctcaaaaaaagccacttgggctgaatctagtgagactgcagaatttatgccagcctgacctgt

SEQ ID NO: 302 - DNA, 494 bp, Homo sapiens
agggtctggagtggatctccaacaaactccagcagacctgcagcagaggggcctgactgttataaggaaaactaacaaacagaaaggaatagcgtcaacatcaacaaaaaggacatccacacaaaaaccccatccgaaggtcaccagcatcaaagaccaaaggtagataaatccatgaagatgaggaaaaaccagtgcaaaaaggctgaaaattccaaaaaccagaacaccttttctcctgcaaaggatcacaactccttgccagcaagagaacaaaactggatggagaatgagtttgacgaatttacagaaggaggcttcagaaggtgggtaataacaaactcctctgagctaaaggagcatgttctaacccaatgcaaggaagctaaaaatgaaaaaaggctggaggaattgctaactagaataaccactttagagaagaacataaatgatctgatggagctgaaaaacacagcacgagaccttcgtgaagc

SEQ ID NO: 303 - DNA, 434 bp, Homo sapiens
ctccgggccgacatgagtggggaccacctccacaacgattcccagatcgaagcggatttccgattgaatgattctcataaacacaaagataaacacaaagatcgagaacaccggcacaaagaacacaagaaggagaaggaccgggaaaagtccaagcatagcaacagtgaacataaagattctgaaaagaaacacaaagagaaggagaagaccaaacacaaagatggaagctcagaaaagcataaagacaaacataaagacagagacaaggaaaaacgaaaagaggaaaaggttcgagcctctggggatgcaaaaataaagaaggagaaggaaaatggcttctctagtccaccacaaattaaagatgaacctgaagatgatggctattttgttcctcctaaagaggatataaagccattaaagagacctcgaga

SEQ ID NO: 304 - DNA, 482 bp, Homo sapiens
ggctgagccgactagtgatttcgagactcctatcgggtggcatgcgtctcccgagctgactcccacgttagggcccctgagcgacactgccccgccgcgggacaggtggatgttctgggcaatgctgccgccaccgccaccaccacttacgtcctcgcttcccgcagccgggtcaaagccttcctctgagtcgcagccccccatggaggcccagtctctccccggggctccgccccccttcgacgcccagattcttcccggggcgcaaccccccttcgacgcccagtctccccttgattctcagcctcaacccagcggccagccttggaatttccatgcttccacatcgtggtattggagacagtcttctgataggtttcctcggcatcagaagtccttcaaccctgcagttaaaaattcttattatccacgaaagtatgatgcaaaattcacagacttcagcttacctcccagtagaaaac

SEQ ID NO: 305 - DNA, 418 bp, Homo sapiens
gaaacagtgttgccatattctccaaactggtctcaaactcctgggctcaagcaatcctccggccttggcgtcccaaaatgctgggattacagatggatgtgagccaccattcctggccacagaatgctaatactagtatattttttaccaaaagagtatcaaggccagagtggtgggtggcacatgcttataacagcactttgggaggctgaggtgggaggatcgcttgagcccaggagttcaagaccagcctgggcaacatgttgagaccctgtgtctagcaaaaaaaaaaaaaaaatcattagccaggcatggtgggacacacctgtggtcctagctactcagtagtcttaggtgggaagatcacttgaacctgggaggtccatgctgcagggagctgaattcgtgccagtgcatt

SEQ ID NO: 306 - DNA, 451 bp, Homo sapiens
  misc_feature (405)..(406): n is a, c, g, or t
  misc_feature (408)..(408): n is a, c, g, or t
  misc_feature (411)..(416): n is a, c, g, or t
ggcatggctggaactgtggcgacaggagcaacgataatggggggctgcactggggttggagccacagccacagcaggagcccgcactggttctcgaaggaggacagtcacattgggggctggatcatgatcaggtatcttcccattaggtttctcttcctttttcttggtctttcctttcttctccactgttttctccttctttttcttctcgactttctggtggtgagttttcgccatctccttgcgctggttggctagggcttcttcatatgacgtttccttcatggagaaagtcgacaccaggaagatgccaatggcagaaacaaccatgaatcctccaaagaccacaacccccaaggtttgagtgtcgtaaatatccatcctggcttgctttcctttcacnngnagnnnnnnacgcgagagggaaagcgagagggcaggagccgccg

SEQ ID NO: 307 - DNA, 484 bp, Homo sapiens
gaaagttctcgattgtcttttttattgagggacagagaagacaagctacgtgagcgagatgaaagactctctagttctttagaaaggaacaaattttactcttttgcattggataagacaatcacaccagacactaaagctttgcttgaaagagctaaatccctctcttcatctcgtgaagaaaattggtcttttcttgattgggactcccgatttgcaaattttcgaaacaacaaagataaagaaaaggttgactctgctccaagacctattccatcctggtacatgaaaaagaagaaaattaggactgattcagaagggaaaatggatgataagaaagaggaccataaagaagaagagcaagagaggcaggaattgtttgcttctcgttttttacacagctcaatctttgaacaagattccaagcgattgcagcatctagagagaaaagaggaagattctgacttcatttctggtaggatct

SEQ ID NO: 308 - DNA, 422 bp, Homo sapiens
gaatggcggcagtggagcatcgtcattcttcaggattgccctactggccctacctcacagctgaaactttaaaaaacaggatgggccaccagccacctcctccaactcaacaacattctataattgataactccctgagcctcaagacaccttccgagtgtgtgctctatccccttccaccctcagcggatgataatctcaagacacctcccgagtgtctgctcactccccttccaccctcagctctaccctcagcggatgataatctcaagacacctgccgagtgcctgctctatccccttccaccctcagcggatgataatctcaagacacctcccgagtgtctgctcactccccttccaccctcagctccaccctcagcggatgataatctcaagacacctcctgagtgtgtctgctca

SEQ ID NO: 309 - DNA, 542 bp, Homo sapiens
aacagtctggatgctggtgccactaatgttgatctaaagcttaaggactatggagtggatctcattgaagtttcaggcaatggatgtggggtagaagaagaaaacttcgaaggctttactctgaaacatcacacatgtaagattcaagagtttgccgacctaactcaggtggaaacttttggctttcggggggaagctctgagctcactttgtgcactgagtgatgtcaccatttctacctgccgtgtatcagcgaaggttgggactcgactggtgtttgatcactatgggaaaatcatccagaaaaccccctacccccgccccagagggatgacagtcagcgtgaagcagttattttctacgctacctgtgcaccataaagaatttcaaaggaatattaagaagaaacgtgcctgcttccccttcgccttctgccgtgattgtcagtttcctgaggcctccccagccatgcttcctgtacagcctgtagaactgactcctagaagtaccccaccccacccctgctccttggaggacaacgt

SEQ ID NO: 310 - DNA, 437 bp, Homo sapiens
ggcgacactttgctacggagtgcatcggacgtcgaagcctagagtctctgcgtctttccctcttccgctgcctcattcctttccttcctagccttggtcgtcgccgccaccatgaacaagaagaagaaaccgttcctagggatgcccgcgcccctcggctacgtgccggggctgggccggggcgccactggcttcaccacgcggtcagacattgggcccgcccgtgatgcaaatgaccctgtggatgatcgccatgcacccccaggcaagagaaccgttggggaccagatgaagaaaaatcaggctgctgacgatgacgacgaggatctaaatgacaccaattacgatgagtttaatggctatgctgggagcctcttctcaagtggaccctacgagaaagatgatgaggaagcagatgctatctatgcagccctgga

SEQ ID NO: 311 - DNA, 439 bp, Homo sapiens
  misc_feature (152)..(166): n is a, c, g, or t
  misc_feature (173)..(173): n is a, c, g, or t
  misc_feature (192)..(192): n is a, c, g, or t
  misc_feature (322)..(323): n is a, c, g, or t
  misc_feature (338)..(338): n is a, c, g, or t
tggatcaagaactgcctgtgcggtgggctctggtggcgggtgcccctcagctacccctgagcccagctgcccctcagctactcctcagctacccctcagctgcccctgagcccggctgctgcaagagccaccgctcgccctggactctcctnnnnnnnnnnnnnnncagcccnccctgcagggctgttgaangccgtgggccggacgcctgcgtgaccagcagagcttctgaggaagcccctgcctttgtccagctgggcccgcagtccacacaccactctcccaggacccccagatccctggaccatctgcatccagaggnncgtccgtgacggccnggggtccaggcggaccttgtggtgacccggctcgggcgtctcctcggtttccttgcctcacccgcggagagcgctgaacctggacaagcagcggctgggaa

SEQ ID NO: 312 - DNA, 356 bp, Homo sapiens
  misc_feature (327)..(327): n is a, c, g, or t
aggtcaatcaggaggcatctggaaagggggggaaaaaagcaaaaaacaaaattaaaaaaaattgatttccatattttttcaaaaccctaaaatattacaaaataagtcccgcatatactttaatgttttaactcttttggacaaaggaatcaattacttgaagttgcttttttgactctgcctacttctgagcaaactatttgcgactcacccacaattccttggagatcaaaatcctgcagatgcctcctgatgggacatagccctaactccttaacaactgtagcaagaactgcacggtacaaacccaaaaaagaacaagctcanctatttggaacccaagcctcatattttct

SEQ ID NO: 313 - DNA, 186 bp, Homo sapiens
agatgatgaccttcttccaaggcctctagagccatcagcctgtgccaggcaccctcgacttgcctagaggcccccaaaagttgcagtccacatcagaggcagagtcagaggcctccatgtcggaggcctcctctgaggacctggtgccacccctggaggctggggcagccccatatagggaggagg

SEQ ID NO: 314 - DNA, 126 bp, Homo sapiens
ggtctcagtctttaatcgtggcagggcctcacgcacgcgcgcacgtacacacactcaggcttcagatcttgttgaaagctgcgatatcgacactctgcacgtgctcctcaaacttggtgatctcct

SEQ ID NO: 315 - DNA, 538 bp, Homo sapiens
gataacaggccatgggccaccacacctgggtttttttttttttttttttaagagatagggtcttgctttgtcacccagactggaggacagtggcatgatcacagcttactgcagccttgacctcctgggctcaagggatcctcccacctcagcctccccagtcgctggaactacaggcacacatcaccacacctggttaattttatttatttattcatttttgtggaagggtctcaccatgttgcccaggctatacaaggcttaattttaaaatttaaaatcagccgggcatggagactctaactgtaatcccagcgctttgggaggccgaggcaggtggatcacctgaggtcaggagttccggacaagcctggccaacatggtgaaaccctgtctctactaaaaatacaaaaaaatgaggcgggcatggtggtatgtgcctgtaatcccagctactcaggagactgaggcaagagaatcgcttgaacccaggaggtggaggttgcagtgagccaagatagcactactgtactccggc

SEQ ID NO: 316 - DNA, 294 bp, Homo sapiens
ggccaatatggtgacaccctgtttctcccaaaaatacaaaaattagccaggcatggtggctcgcgcctgtagtcccagctacttgggaggctgaggcagaagaattgcttgaacccaggatgtggcggttgcagtgagccgagatggtgccactgcactccagcctgggtgacagagggagactccgtgtcaaaaaaaaaaagaaaaaaacgtgcgctgcctgggtgtggtggcttacgcctataatcccagcactttgggaggccaaggtgtgtgaatcattcgaggtcagga

SEQ ID NO: 317 - DNA, 527 bp, Homo sapiens
ggccttgacacattacaagcctggaaaaaaacatcagaaataataaaaaatttcagagagaatcaagatacctttttttttcttttttttttcttttttttattatactctaagttttagggtacatgtgcacattgtgcaggttagttacatatgtatacatgtgccatgctggtgcgctgcacccactaatgtgtcatctagcattaggtatatctcccagtgctatccctcccccctcccccgaccccaccacagtccccagagtgtgatattccccttcctgtgtccatgtgatctcattgttcaattcccacctatgagtgagaatatgcggtgtttggttttttgttcttgcgatagtttactgagaatgatggtttccaatttcatccatgtccctacaaaggatatgaactcatcattttttatggctgcatagtattccatggtgtatatgtgccacattttcttaatccagtctatcattgttggacatttgggttggttccaagtctttgctattg

SEQ ID NO: 318 - DNA, 485 bp, Homo sapiens
gcagcgtgagcagccggaggatcgcggagtcccaatgaaacgggcagccatggccctccacagcccgcagtatatttttggagattttagccctgatgaattcaatcaattctttgtgactcctcgatcttcagttgagcttcctccatacagtggaacagttctgtgtggcacacaggctgtggataaactacctgatggacaagaatatcagagaattgagtttggtgtcgatgaagtcattgaacccagtgacactttgccgagaacccccagctacagtatttcaagcacactgaaccctcaggcccctgaatttattctcggttgtacagcttccaaaataacccctgatggtatcactaaagaagcaagctatggctccatcgactgccagtacccaggctctgccctcgctttggatggaagttctaatgtggaggcggaagttttggaaaatgatggtgtctcaggtggtcttggac

SEQ ID NO: 319 - DNA, 459 bp, Homo sapiens
gggaacatcaacggtggaaatcacttgggatgagactgatcatgaaagaattacaatgctcaacaggaagtttaaaaaggaagagcttttggacatggattttcaagcctacttagcttcctctagtgaagacgaagaggagatagaagaggagctacaaggtgatgatggagtcaatgtagaagaagatgggaaaacaaagaaaagtcagaaggatgatgaagagcaaattgctaaatacaggcagctcttgcaggttattcaagaaaaagaaaagaaaggcaaagaaaatgatatggaaatggaaattaaatgggttccaggtcttaaagaaagtgcagaagagatggtcaaaaacaaattggaaggaaaggataaactgaccccttgggaacaatttttagaaaagaagaaagagaaaaaaagactgaaaaggaaacagaaggctcttgctgaaga

SEQ ID NO: 320 - DNA, 479 bp, Homo sapiens
aatgaccacagcggtcatctctacctgcgaccatggtatagtagccaagatcaagagagtgatcatggagagagacacttaccctcggaagtggggtttaggtccaaaggcaagtcagaagaagctgatgatcaagcagggccttctggacaagcatgggaagcccacagacagcacacctgccacctggaagcaggagtatgttgactacagtgagtctgccaaaaaagaggtggttgctgaagtggtaaaagccccgcaggtagttgccgaagcagcaaaaactgcgaaggtgagtggcatgctgtcctcagtttggaatcggaagcgagagagtgagagtgaaagtgacgagactcctccagcagctcctcagttgatcaagaaggaaaagaagaagagtaagaaggacaagaaggccaaagctggtctggagagcggggccgagcctggagatggggacagtgataccaccaaga

SEQ ID NO: 321 - DNA, 556 bp, Homo sapiens
tagccgaccatggtggtgcatgcctgtagtcccagctattcgggaggctgaggtaagaggatcacctaagcctgtgaggtcatggttgcaatgagtcatgatcacgccactgcgctacagcctgggcgacacagtaagaccctgtctcaaaaaaaagaagtgtgtttctggccaggcacggtggctcacgcctgtaatcccagcactttgggaggcctaggtgggcagatcatgaggtcaggagttcgagaccagcctggccaacatggcgaaacacctgtctctactaaaaatacaaaaattaggccgggcgcagtggctcacacctgtaatcccaacactttgggaggccgacccagatgggtggatcacctgaggtcaggagtttgagaccagccttgacaacatggtgaaaccccatctctggtagaaatataaaaaattaaccgggcatggtggtggacgcctgtaatcccagctacttgggaggctgaggcagaataatcgcttgaacccaggaggcagaggttgcagtaagccaagatcgtgcctctgc

SEQ ID NO: 322 - DNA, 335 bp, Homo sapiens
gagtgcatctagtgagagtgaagctgaaaatcttgaagcacaaccccagtctactgtccgtccagaagagatccctcctatacctgaaaatagattcctaatgagaaaaagtcctcctaaagctgatgagaaggaaaggaaaaacagagagagagaaagggaaagagagtgtaatccacctaactcccagcctgcttcataccagagacgacttttagttactagatctggcaggaaaattaaaggaagaggaccaaggcgttatcgaactccttccagatccagatcaagggatcgtttcagacgtagtgagactcctccacattggaggcaag

SEQ ID NO: 323 - DNA, 523 bp, Homo sapiens
ttatgctgcatttggctggagcccggtgttcagtggtttccctgcccgaggtcgctgcagccccatctaccacatcttcatgtggacattgagattcacatgctggctcctgaagggtgctcagtctccttggtgattaaggtcctgcttgaactgctgccaactccatgtcagggaagtcgcttttggtgcctggctggtttgcccagagccaagctggggcaaggggcagccagccctggcttccaaggctcccgtactgtctgtgtccttgtataaggagctttgctcttggaattactgaaagtctgtggccctaagagagagacacaagtggccttaagtctttttgaagtgttatttcatccagggaaatgcctcgagccatagagcctgaaatcatctttgttggctcagaaaataccttagcttcactcagctggactgcattgaaggcgaggctgccccttggatcaagcagaaaacaagagaaagaaagaacgttccctttggggatagtctg

SEQ ID NO: 324 - DNA, 564 bp, Homo sapiens
atgacctttctgagtacgatgctgagtattccacgtggaacagagattatcagctgtctgaagaggaggcgcgaatagaggccctgtgtgatgaagagaggtatttagccttgcatacggacttgcttgaggaggaggcaaggcaagaggaagaatacaagcgattgagtgaagcactagcagaggatgggagctacaatgccgtggggttcacttacggtagcgactattacgacccgtcagagccgacggaggaggaggagccttccaaacagagagaaaaaaatgaggccgaaaatttagaggaaaatgaagagcccttcgttgcccccttaggattgagcgtcccgtctgacgtggagttgccaccaaccgctaaaatgcacgccatcatcgagcgcacggccagcttcgtgtgcaggcagggagcacagtttgagatcatgctgaaggccaagcaggcccggaactcccagtttgactttctgcgcttcgaccactacctcaacccctactataagttcatccagaaagccatgaaagagggacgctacactgtcctgg

SEQ ID NO: 325 - DNA, 230 bp, Homo sapiens
gtggtggcacaaaggctgaggaagctagaatttcctgtgaaggacagtggagaacccagtgtccctcgggctgacaagaaccacttcccaagacccacagtgcctggagaggacatggggaagggaccagtgtatcagttgcgtggagatactagagacacacttgcccagctgggaattgcagagctagtgcatttctcccaaagcacagactaataccccagatttaa

SEQ ID NO: 326 - DNA, 392 bp, Homo sapiens
  misc_feature (27)..(27): n is a, c, g, or t
  misc_feature (30)..(31): n is a, c, g, or t
  misc_feature (33)..(35): n is a, c, g, or t
  misc_feature (37)..(39): n is a, c, g, or t
  misc_feature (41)..(41): n is a, c, g, or t
  misc_feature (43)..(44): n is a, c, g, or t
  misc_feature (47)..(49): n is a, c, g, or t
  misc_feature (52)..(52): n is a, c, g, or t
  misc_feature (54)..(54): n is a, c, g, or t
  misc_feature (57)..(59): n is a, c, g, or t
  misc_feature (86)..(86): n is a, c, g, or t
  misc_feature (128)..(168): n is a, c, g, or t
  misc_feature (175)..(196): n is a, c, g, or t
  misc_feature (205)..(205): n is a, c, g, or t
  misc_feature (241)..(278): n is a, c, g, or t
ctctggtacccaaaagggcagagaagnaanncnnngnnnancnnagnnncantnatnnntcctcccctccccaccccttcttcccntgcttccattccccatggctctctcctctgactgtgaaacannnnnnnnnnnnnnnnnnnnnnnnnnnnnnnnnnnnnnnnnggatctnnnnnnnnnnnnnnnnnnnnnnaaaaatggngattgtggctgccagcacccacaagacagcagcctnnnnnnnnnnnnnnnnnnnnnnnnnnnnnnnnnnnnnnctcccagagtctgtttcctcacctgctgttcactggtgagaggaaaagggacttgttctcccttgaccagttttctagttttcctgttcccaccctggtctttgcctgatgaca

SEQ ID NO: 327 - DNA, 565 bp, Homo sapiens
  misc_feature (26)..(26): n is a, c, g, or t
  misc_feature (35)..(35): n is a, c, g, or t
  misc_feature (48)..(48): n is a, c, g, or t
  misc_feature (70)..(70): n is a, c, g, or t
  misc_feature (83)..(86): n is a, c, g, or t
  misc_feature (102)..(103): n is a, c, g, or t
  misc_feature (109)..(109): n is a, c, g, or t
  misc_feature (137)..(138): n is a, c, g, or t
  misc_feature (145)..(145): n is a, c, g, or t
  misc_feature (151)..(151): n is a, c, g, or t
  misc_feature (187)..(187): n is a, c, g, or t
  misc_feature (200)..(201): n is a, c, g, or t
  misc_feature (256)..(256): n is a, c, g, or t
tgacagaggccatgtccaaaatcccntagagacantgttgtcttaganttgttaaaataagagcccccantatcaggtttagnnnntactgtcaccgaacgnncgtcgntgtcctcagctccacctccctttccttnnacagatntggttngttttctaagccaggactggttttagtcaggtcctngggcgaatcctgnnaaaaaaagaggtagtacgggtaaggaaggcacccaacagggctttcacaatccanaaaatatcaaaatataagtgttaaaagagaggcacaggccgggtgcggtggctcacgcctgtaatctcagcactttgggaggccaaggtgggcagatcatgaggtcaggagtttgagaccagcctggccaatatgatgaaaccccgtttctactaaaaatacaaaagttagccaggcatggtggtgtgctcctgtaatcccagctacttaggaggctgaggccagagaattgcttgaaccctggagtcagaggttgcagtgagccgggatcatgccactgtactccaggctgggtgacaaagtgagact

SEQ ID NO: 328 - DNA, 365 bp, Homo sapiens
  misc_feature (72)..(72): n is a, c, g, or t
tactggaatccaatcggaagggtcccaagcaagacagaactgcagaagggcaagcactaagtgaagcaaganagcatttaaaagaagagacacaattacgattggatgttgagaaagaactggagatgcagatcagcatgaggcaggagatggaattggctatgaagatgctggagaaggatgtctgtgagaagcaggatgccctggtatctcttcggcagcagctggatgacctcagagctctcaagcatgaacttgcctttaagctgcagagttcagacttaggagtaaaacagaaaagtgaactaaacagtcgcttggaagagaagactaatcagatggctgctaccattaaacaacttgaa

SEQ ID NO: 329 - DNA, 187 bp, Homo sapiens
tggcaggactccagatgaggacaagagggacaaggtatggggtgggagccacaattgaggataccccgagctaccaggagagccctgggctggaggctgagctggatccctgctccccacacggaggacccaacaggaggccgtggctctgatgctgagcgaagctataggctcttgttggataaaa

SEQ ID NO: 330 - DNA, 468 bp, Homo sapiens
gaacaggataaagctcgccgggaatgggaaagacagaagagaagggaaatggcaagggagcattccaggagagaaagggaccgcttggagcagttagaaaggaagcgggagcgggagcgcaagatgcgggagcagcagaaggagcagcagtcaagaagatgaccttcagcgagcacccctacaacaacctccgcaagcgcttcggggctctgctctcagaccagggcttcgacctcatgaacaagttcctgacctacttccccgggaggaggatcagcgctgaggacggcctcaagcatgagtatttccgcgagacccccctccccatcgacccctccatgttccccacgtggcccgccaagagcgagcagcagcgtgtgaagcggggcaccagcccgaggccccctgagggaggcctgggctacagccagctgggtgacgacgacctgaaggagacgggcttccacc

SEQ ID NO: 331 - DNA, 135 bp, Homo sapiens
gctcctgttcttgttctttttcaagttctttctcacgctcccgttctttttctcgctccctttccctaatttcctctggagatggttgtttttccaggatgccaagcttctcatccaatcgtttcagtttctccg

SEQ ID NO: 332 - DNA, 489 bp, Homo sapiens
gggtagagctgggggcatcagagccctgcaccctggaacatagaagtctagagtccagtctaccaccctgctgcagtcagtgggctccagcaaccaccagcctgatcttctcttcccaacacccgctttgtgccagcccccctatctgctcactccagtctttgagacccccagcaggccaggcaggcctcagcaatctggcccctcgaaccctagccctgagggagagcctcaaatcgtgtttaaccgccatccactgcttccacgaggctcgtctggacgatgagtgtgccttttacaccagccgagcctctccctcaggccccacccgggtctgcaccaaccctgtggctacattactcgaatggcaggatgccctgtgtttcattccagttggttctgctgccccccagggctctccatgatgagacaaccactcctgccctgccgtacttcttccttttagcccttatttattgtcggtctgcc

SEQ ID NO: 333 - DNA, 344 bp, Homo sapiens
ataaaaaataggggccaggcacagtggctcatacctgtaatgccagcactttgggaggccaaggcgggcagatcacgaggtcaggagtttcagaccaatatggtgaaaccccatctctactaaaattacaaaaaaaattatccaggcgtggtggtgcacgcctgtgatcccagctactcgggaggctaaggcaggagaatcacttgaacccaggaggcagaggttggggtgagctgagattgcgccaccgcactccagcctgggcaacagagcgagactccatctcaaacaaaaacaagaacaaaaacaaacataaagttggcacagaaaagggaccaagttta

SEQ ID NO: 334 - DNA, 408 bp, Homo sapiens
  misc_feature (27)..(27): n is a, c, g, or t
  misc_feature (37)..(37): n is a, c, g, or t
aaatgtcagtagttcttgcctcagggntgaacataanatctgtgttttatgaagacgtaagcccaccgtattctgtctggaaacagtttggaaatcagggaaccttaactttacatgctcaggatatggagtccaccagtctacccatcagctgcgtcgaaagggagtgatttcttttgttaacagattatggaatagcaaatatctaaaaactgtctcttagcttcctgtttcacgggtcttcttggccaacatttatactgctacaggggactccatatcataaacaagcatctaggataagtcagctgttcggtcagtcactccatcagggagccctaggtccctgctccctgcccctctcctcctgtgaacttgtggcctgtgcaggctcactcacaaaggcgc

SEQ ID NO: 335 - DNA, 358 bp, Homo sapiens
aaaaagatatgcttatacactgttggtggaaatgtaaattaaattagttcagccattgtggaagacagtgtggggataaagacagagataccattcaacccagcaatctcattactgggtatatacccaaaggaatagaaatcattgttataaagacacatgcacgcgtatgttcgttgcagcactgcccatcagtgacagactggattaaaaaaatgtggtacatacacaccagggaatactatacagccataaaaaggaacaagactgactgggcgtggtggctcatgcctgtgatcctagcactttgcgaggccgaggtgggtggattgcccgcgctcaggaggtcaagaccagc

SEQ ID NO: 336 - DNA, 518 bp, Homo sapiens
  misc_feature (88)..(88): n is a, c, g, or t
  misc_feature (216)..(216): n is a, c, g, or t
  misc_feature (276)..(276): n is a, c, g, or t
ctggtgccagtgtatcactgttggcactactttgagttactaaagcaattgaaagcatgtagtgaagaacaagaagacagagaatgtntgaaccaagctattactgctctcatgaatctccaaggtagcatggaccgaatttacaagcagtattcacctagacgtcgacctggagatcctgtttgccctttttatagtcaccaattaagaagcaancacctggctatcaaaaaaatgaatgaaattcagaaaaatatcgatggatgggaaggcaangatattggacagtgttgtaatgaattcattatggagggaccattgacaagaatcggtgccaaacatgaacggcatatttttctgtttgatggcttaatgatcagttgtaaacctaatcatggccagactcggcttccaggttacagtagtgcagaatacaggttaaaagaaaaatttgtcatgaggaaaatacaaatttgtgataaagaagatacttgtgagcacaagcatgcatttgaatt

SEQ ID NO: 337 - DNA, 370 bp, Homo sapiens
ttcatctcatctcatatttttgatatcatttttcatatcatttttcatctcatttcatctcaattcatctcatcatttcatctcctcatctcatcatttcctcctttcattacaacatttcatctcatttcttctcatctcatttcaatttcattatttcatctcatttcattatttcacctaatttcattatttcatctcatctcatctcagttcatctgatctcatttcatctcagcatttcatctcatcagttttcatctcatcatttaatctcatttcatttcatttgatctcatcatttcagctcatttcatgtcacatctattcatttcatcatttcatttcaacatttcaccatttcatctca

SEQ ID NO: 338 - DNA, 491 bp, Homo sapiens
cactggagacagtcatccgacgggcccggcccgagctccgtcggccaggcgtgcagggtatccccagggtccacgagctcaagattgaagaatatgtgcagcgggggctacagcgagtggggctagatccccagctgccactgaatctggctgcccttcaggcccacctggcccaggagaaccgtgtggtggccttcttcagcctggctctactgcttgccccactggtggagacgcttattctactggaccggctgctgtaccttcaggaacagggtttccatgctgagctcctgcccatcttcagtcctgaactctctcccagaaacctggttctggtggccaccaagatgcccctgggtcaggctctttctgttctggagactgaagacagctgatgcagcctgaggagacatctcagaccccatcatctgaaagtgcccagagagcacagtggcagagtacatctcatccagagaaacagcatcctg

SEQ ID NO: 339 - DNA, 552 bp, Homo sapiens
ggagaggaacctattctccatgcagatcttgggagctgcaacggtgcatctgtctcacaaaaaggttccttgtcccctgcccgctcagctacccccaaagttcgacttgtagagccccatagcccttctccttcaagcaaattcagcacaaaaggcctctgtaagaaaaagttgagtggggaaggggacacagaccttggggccttatccaatgatggctctgatgatggaccctcagtgatggatgaaacaagcaatgatgcctttgattctttagaaaggaagtgtatggaaaaagaaaaatgtaaaaaaccctctagtttaaaacctgaaaagattccttccaagagcctaaagtcagcccgtcccattgcccctgccatccccccacagcaaatctacaccttccagacagccaccttcacagcagcgagcccaggctcttcctcaggcttgaccgccacagtggcacaagccatgcccaacagtccccaactcaagcccattcagcccaagcccactgttatgggagaacctttcacagtcaaccct

SEQ ID NO: 340 - DNA, 376 bp, Homo sapiens
ggagagaccccttcagagcagggattgtgccgggagagtgcctctgactttgggacatttcatccacagaaatttccaagccaatggtttcttttgggttttggtttttatgtttgttttttggggtttggaaaaacatgcatttttaccgtgcacgtaaattggtcagcagaaaagggagcccagaaaaggcagcagatggaccatgcccttgctgggttttccttttctttgggactgtgaggggaaatggtttttagaggtgagggttggtccatgtggaggaaagaagtgtctctgttgggggacagaggaacctggggagtccatcgcatgtcctacaatctgctcttagacacggccttgccaggagagc

SEQ ID NO: 341 - DNA, 521 bp, Homo sapiens
  misc_feature (266)..(266): n is a, c, g, or t
gcaacaacaagctccgagggcagccattctatgctgtggaaaagaaagcatactgcgagccctgctacattaatactctggagcagtgcaatgtgtgttccaagcccatcatggagcggattctccgagccaccgggaaggcctatcatcctcactgtttcacctgcgtgatgtgccaccgcagcctggatgggatcccattcactgtggatgctggcgggctcattcactgcattgaggacttccacaagaaatttgccccgcgntgttctgtgtgcaaggagcctattatgccagccccgggccaggaggagactgtccgtattgtggctttggatcgagatttccatgttcactgctaccgatgcgaggattgcggtggtctcctgtctgaaggagataaccaaggctgctaccccttggatgggcacatcctctgcaagacctgcaactctgcccgcatcagggtgttgaccgccaaggcgagcactgacctttagattcagtcacctgttcagccg

SEQ ID NO: 342 - DNA, 335 bp, Homo sapiens
cggccagcgcgaagcggaagcaggaggagaagcacctgaagatgctgcgggacatgaccggcctcccgcacaaccgaaagtgcttcgactgcgaccagcgcggccccacctacgttaacatgacggtcggctccttcgtgtgtacctcctgctccggcagcctgcgaggattaaatccaccacacagggtgaaatctatctccatgacaacattcacacaacaggaaattgaattcttacaaaaacatggaaatgaagtctgtaaacagatttggctaggattatttgatgatagatcttcagcaattccagacttcagggatccacaaaaagtg

SEQ ID NO: 343 - DNA, 545 bp, Homo sapiens
aaagaggaatccccatatactattggtgggaatgtaaattagtatagccactatggagaacagtacagtttcctcaaaaaactaaaaataggctgggcgtggtggctcatgcctgtaatcccagcaccctgggaggccgaggcaggtggatcacttgaggtcaggagttcgagaccagcctagctaacatggtaaaactctgtctctactaaaaatacaaaaattagctgggcgtgctggcacgtgcctatagtcccagcaacttgggaggctgaggcagaagtattgcttgaacccaggaggcagaggttgcagtgagctgagatcaccccactgtcctccagcctgggcaacagagagactgtctccaaagaaaaaaaaagaaatagaactaccatatgatccagtaatcccactgctgggtatctgtcagcaaggaaatcagtatattgaaaagataccagtactcccatgtttactgcagcactatttgcaatagccaagatatggaatcagcctaagtgtccatccacgaatgaatgaag

SEQ ID NO: 344 - DNA, 485 bp, Homo sapiens
  misc_feature (26)..(26): n is a, c, g, or t
  misc_feature (42)..(42): n is a, c, g, or t
  misc_feature (48)..(48): n is a, c, g, or t
  misc_feature (59)..(59): n is a, c, g, or t
  misc_feature (282)..(355): n is a, c, g, or t
tacagcgccttgtgagcaggacggcnagcaagtacacagacngggccntgcgggccagntacacaccatccccagcacgctccacccacctcaagaccccggccagtgggctgcagacccccacaagcacaccggcgcctggctctgccacacgcacccctctcacacaggacccggcctccatcacggacaacctgctgcagctccctgcccggcgcaaagcttcggacttcttttagagccaggcctgggctgggctcatagacgcttcacagagcctgnnnnnnnnnnnnnnnnnnnnnnnnnnnnnnnnnnnnnnnnnnnnnnnnnnnnnnnnnnnnnnnnnnnnnnnnnnaccaggagtcactggagaaaggggctgtgctggggccagactggcacaaggcactcgtgcccacaccacaccccagggccttgccaagctgtttgctgtttaattggccccttgaactgtcattaaagaa

SEQ ID NO: 345 - DNA, 497 bp, Homo sapiens
gactgaacaggagacccttctactcctggaggccctggagatgtacaaggatgattggaacaaagtgtcggaacatgttggaagtcgtactcaggatgaatgcatcctccactttttgagacttcccattgaggacccataccttgagaattcagatgcttcccttgggcctttggcctaccagcctgtccccttcagtcagtcaggaaatccagttatgagtactgttgcttttttggcatctgtggtggaccctcgcgtggcatctgctgcagcaaaagcggctttggaggagttttctcgggtccgggaggaggtaccactggaattggttgaagctcatgtcaagaaagtacaagaagcagcacgagcctctgggaaagtggatcccacctacggtctggagagcagctgcattgcaggcacagggcccgatgagccagagaagcttgaaggagctgaagaggaaaaaatggaagccgaccctgatggtcagc

SEQ ID NO: 346 - DNA, 389 bp, Homo sapiens
ccatcgccacagaagcggtaccaggacaccccgggcgtggagcacattcccgtggtgcagattgacctctccgtccccttgaaggttccagggctgcctatgtcagatcagtatgtgaagctggaggaggagcggcggcaccggcagaagctggagaaggacaagaggaggaaaaagaggaaggagaaggagaagaagggcaagcgccgccacagctcgctgcccacggagagcgacgaggacatcgcccctgcccagcaggtggacatcgtcacagaggagatgcctgagaatgctctgcccagcgacgaggatgacaaagaccccaacgacccctacagggctctggatattgacctggataagcccttagccgacagcgagaaact

SEQ ID NO: 347 - DNA, 527 bp, Homo sapiens
gaggtacagcggcggtttctgaggttcttcactcgcgactgacggagctgcggtggcgtctccacacgcaaccatgaagttgaaggacacaaaatcaaggccaaagcagtcaagctgtggcaaatttcagacaaagggaatcaaagttgtgggaaaatggaaggaagtgaagattgacccaaatatgtttgcagatggacagatggatgacttggtgtgctttgaggaattgacagattaccagttggtctcccctgccaagaatccctccagtctcttctcaaaggaagcacccaagagaaaggcacaagctgtttcagaagaagaggaggaggaggagggaaagtctagctcaccaaagaaaaagatcaagttgaagaaaagtaaaaatgtagcaactgaaggaaccagtacccagaaagaatttgaagtgaaagatcctgagctggaggcccagggagatgacatggtttgtgatgatccggaggctggggagatgacatcagaaaacctggtccaaactgctc

SEQ ID NO: 348 - DNA, 463 bp, Homo sapiens
tttgccgacctacctcaggttgaaacttttggctttcggggggaagctctgagctcactttgtgcactgagtgatgtcaccatttctacctgccatgtatcggcgaaggttgggactcgactggtgtttgatcactatgggaaaatcatccagaaaaccccctacccccaccccagagggatgacagtcagtgtgaagcagttattttctacgctacctgtgcaccataaagaatttcaaaggaatattaagaagaaacgtgcctgcttccccttcgccttctgccgtgattgtcagtttcctgaggcctccccagccatgcttcctgtacagcctgcagaactgactcctagaagtaccccaccccacccctgctccttggaggacaacgtgatcactgtattcagctctgtcaagaatggtccaggttcttctagatgatctgcaaaaatggctcctctcc

SEQ ID NO: 349 - DNA, 303 bp, Homo sapiens
gaggagggctcagaggtaaccaacagcaagagtcgtgatgtgtacaagctgccgccacccacacccccggggccacccggagatgcctgcagatcccgcatcccatctccactgcagcctgagatgcagggcacccctgacgatgagccctctgagcccgagccctcaccctccacactcatctatcgcaacatgcagcgctggaaacgcatccgccagaggtggaaggaggcctctcatcggaaccagcttcgttactcagaaagcatgaagatcctacgagagatgtacgaacgacagtga

SEQ ID NO: 350 - DNA, 418 bp, Homo sapiens
caagaagcacaaagatcacccaggaaattcatcaccaaaagatcttcacctaggtacactgtcatcaggttatccaaaggaaaccattttaagagctgtgagcagaagcaccaggtaacttacaaaggaaaaatctatcagattaacagcagatttctcagcagaaaccctacaagctaagacagaattggggccctatcttcagccccctcaaacaaaacaattatcagccaagaattttgtatacagcgaaactaagcatcatatttgaaggaaagatacagtcatcttcagacaaacaaatgccaagataattcacaccaagccaccactacaagaactgataaaaggagctctaaatattgaaacaaatcctggaaaacagagcttctttaaagcataaatcacgtgggaccta

SEQ ID NO: 351 - DNA, 463 bp, Homo sapiens
  misc_feature (142)..(142): n is a, c, g, or t
  misc_feature (193)..(193): n is a, c, g, or t
tttgccgacctacctcaggttgaaacttttggctttcggggggaagctctgagctcactttgtgcactgagtgatgtcaccatttctacctgccatgtatcggcgaaggttgggactcgactggtgtttgatcactatgggnaaaatcatccagaaaaccccctacccccaccccagagggatgacagtcagngtgaagcagttattttctacgctacctgtgcaccataaagaatttcaaaggaatattaagaagaaacgtgcctgcttccccttcgccttctgccgtgattgtcagtttcctgaggcctccccagccatgcttcctgtacagcctgcagaactgactcctagaagtaccccaccccacccctgctccttggaggacaacgtgatcactgtattcagctctgtcaagaatggtccaggttcttctagatgatctgcacaaatggctcctctc

SEQ ID NO: 352 - DNA, 395 bp, Homo sapiens
agagcctcagggaccagtgggaaaacatcaagaggtctaacgtctgagtcactggagtcacagaaggagaggagaaagatcagtgcaagaaaagaaaactgaagaaataatggcaaaaaaaaaaagtcctcaaatttggtgaaagacaaaaactgcccatctaggctgtggcaggcctactagggaatggacaaaaagttccggcacgttccactggctgagggagcatgggacacggacagctcagctgcacgtccgtaaaccgtcccttccacggccaccctgggcatggggaggggcgggggtgtttgtggagaaaaaccagcaccgcagaagtacaaattcaaaaatcttaatttattgtagactcttctcatttgtaattccagtgtttt

SEQ ID NO: 353 - DNA, 538 bp, Homo sapiens
  misc_feature (31)..(31): n is a, c, g, or t
  misc_feature (53)..(53): n is a, c, g, or t
  misc_feature (76)..(91): n is a, c, g, or t
  misc_feature (97)..(97): n is a, c, g, or t
  misc_feature (101)..(101): n is a, c, g, or t
  misc_feature (103)..(103): n is a, c, g, or t
  misc_feature (106)..(109): n is a, c, g, or t
  misc_feature (111)..(114): n is a, c, g, or t
  misc_feature (116)..(132): n is a, c, g, or t
  misc_feature (134)..(134): n is a, c, g, or t
  misc_feature (138)..(138): n is a, c, g, or t
  misc_feature (180)..(180): n is a, c, g, or t
  misc_feature (213)..(213): n is a, c, g, or t
tgtgctgtggatcctgcttgtctgctctggnagtccccccacccttgccaggnagcttcacaaaccagagacgggnnnnnnnnnnnnnnnncagacnggangnggnnnnannnncnnnnnnnnnnnnnnnnncntcanctgcaggagctagtctcaggtgttctggggatgcctcaggcntaagaattttgccgactttctgggcttggttgnctaatgccaaatgcccctgcttaaatatcacaaggtgctgattctccttttttctttttttcataccaatgtgctcaaactttgagctaggtcttgtgagtttgcctagcactcagacctgtttaagtaacgttctttacattgaaacaagtcaaccgaagctttgtggtgcaggagctgagggtgccccagactcagtgggagccctggttgggccccaaactctcccagcagggtcctcggtttcctcatttgtgaaataaatgagtgggccacgacgttaataagcccaagagaactgtgaaggtggtagtcccttgcccta

SEQ ID NO: 354 - DNA, 522 bp, Homo sapiens
gcataagaacgggcgcttctaccagtgtgaagtggtcaggctcaccaccgagaccttctatgaagtcaactttgatgatggctccttcagcgacaatctttatcctgaggacatagtgagccaggactgtctccagtttggtcctcctgctgaaggggaagtggtccaagtgagatggacagacggccaagtctatggagccaagtttgtggcctcccaccctatccaaatgtaccaggtggagtttgaggatggctcacaacttgtggttaagagagatgatgtatacacactggatgaagagcttcccaagagagtcaaatctagactgtcagtagcctcagacatgcgcttcaatgagattttcacagagaaagaggttaagcaagaaaagaaacggcaacgagttatcaactcaagataccgggaagattatattgagcctgcactataccgggccatcatggagtaggtgcttccagggtccaagggattctcagccatccaggcaagagcactctg

SEQ ID NO: 355 - DNA, 577 bp, Homo sapiens
gacagcctgagacagttcttacggaaacaccccaggacacaattgaattaaacagattgaatttagaatcttccaattcaaagtactccttgaatacagattcctcagtgtcttatattgattcagctgtaatttcacctgatactgtcccactgggaacaggaacttccatattatctaaacaggttcaaaataaaccaaaaactggtcgaagtttattaggaggaccagcagctcttagtccattaaccccaagttttgggattttgccattagaaaccccaagtcctggagatggatcctatttacaaaactacactaatacacctcctgtaattgatgtgccatccaccggagccccttcaaaaaagtctgttgccagaatcggccaaactggaacaaagtctgtcttctcacagagtggaaatagccgagaggtaactccaattcttgcacaaacacaaagttctggtccacaaacaagtacaacacctcaggtattgagccccactattacatctcccccaaacgcactgcctcgaagaagttcacgactctttactagtgacagctccac

SEQ ID NO: 356 - DNA, 342 bp, Homo sapiens
ctgcattgaccttaggcccatagagagggcctgtcccggtgctgccccagccaggatctggtcgctgccccagggggactgatgggcagagtcgcccctgtggctggactgtgaccatccctgatggggcctgaccgcgggagctgaggaagcgccgctccaccgtctgccctccaaggacccgcatggaggcagtgggctggcagcttcctgctgctccctgtcagagtcaaagcacaaatcctcaggacgggctcaagggccagggcagccgagggaagctccaggtggggaccacgtcttcctgaggttggtgcccactggctgggaccctttgcagtg

SEQ ID NO: 357 - DNA, 444 bp, Homo sapiens
  misc_feature (98)..(98): n is a, c, g, or t
  misc_feature (263)..(263): n is a, c, g, or t
ctacaactgcctcacgaatgacacagacctgtacagcgactgtctccgaaccttctggacctgcccccactgtggcctgcatgcgcccctcacgcccntggagcgcatcgcccatgagaacacctgcccccaggccccacaggatgggcccccaggggctgaggaagctgccctcgaaaccctccagaagacatctgtcctgcagaggccctaccactgcgaggcctgcgggaaggacttcctctttacacccacagaggtgntgcgccaccggaagcagcacgtgtgagctgggccaggagccctgcccacctccgtgcagctgacctgccctccagcccaggactaggggcaggactcttgcctgaacccccagcctgggcttagccctgtggtcctgtcccagtgcagagggcctggagcacggattgtgaataaagcctc

SEQ ID NO: 358 - DNA, 537 bp, Homo sapiens
  misc_feature (32)..(33): n is a, c, g, or t
  misc_feature (37)..(38): n is a, c, g, or t
  misc_feature (60)..(65): n is a, c, g, or t
  misc_feature (68)..(69): n is a, c, g, or t
  misc_feature (71)..(73): n is a, c, g, or t
  misc_feature (75)..(76): n is a, c, g, or t
  misc_feature (80)..(86): n is a, c, g, or t
  misc_feature (128)..(128): n is a, c, g, or t
  misc_feature (132)..(132): n is a, c, g, or t
  misc_feature (134)..(135): n is a, c, g, or t
  misc_feature (138)..(139): n is a, c, g, or t
  misc_feature (141)..(141): n is a, c, g, or t
  misc_feature (143)..(144): n is a, c, g, or t
  misc_feature (455)..(455): n is a, c, g, or t
  misc_feature (489)..(495): n is a, c, g, or t
  misc_feature (497)..(499): n is a, c, g, or t
gagcagacctgagagaattgttgttataatgnnaggnntacctggcagtggaaagacacnnnnnncannannnanncgannnnnnngtaatggaatatgaatatgaagctgagatggaggagacttancgcncnngcnngntnnaaactttcaaaaagactctggatgatggcttttttcccttcatcatcctggatgccatcaatgacagagttaggcattttgaccagttttggagtgcagcaaaaaccaagggatttgaggtatatttggctgaaatgagtgcagataaccagacttgtggcaagagaaatattcatggaagaaagcttaaagaaataaataagatggctgatcactgggaaactgcacctcgtcacatgatgcgtctagatattcgttctttgctgcaagatgctgctattgaagaggtagagatggaagattttgatgcnaatatcgaagaacagaaagaagaaaagaaagatnnnnnnnannnggaaagcgaactggtaggagacagaccaaccactttga

SEQ ID NO: 359 - DNA, 433 bp, Homo sapiens
  misc_feature (138)..(138): n is a, c, g, or t
  misc_feature (156)..(156): n is a, c, g, or t
  misc_feature (170)..(170): n is a, c, g, or t
  misc_feature (172)..(172): n is a, c, g, or t
  misc_feature (325)..(325): n is a, c, g, or t
tctctctgtgtgaaggggcctctccctaatgtctcctccttcccccctcttctctctcctgcggcccagcctccctctccctcctccattcctctctccctgcccttttcctgcctgaagagcagaggtgaggacctngggacccctgaggggcanggccaggaggagcntngggcgcaggccaggcccccttggtgaagcagaggctgaaggaaaggggtctgggtcttgtccctaggaattctcctccctcaggagattgggggttgggggaggcagcgggtgatggctctgaagctgaacccagggcctggctgtggtcttnttggtcttgctgccccctgtgacccaaaggcatgggatggacagagatgcctgcccccgtgaagctggttggggagggcagttcaccagcatccatagagtaataaag

SEQ ID NO: 360 - DNA, 514 bp, Homo sapiens
ggagttcaagatcaaccaacatagcaagaccctgtctctactaaaaatacaaaaattagctgggtgtggtggcaggcacctgtaatcccagctactcgggagcctgaggcagaagaatcgcttgaacccaggaggcagaggttgcagtgagctgagattgtgccattgcactccagcctggccaacaagagtgaaactccgtgtaaaaaaaataaaataaaataagctacctaaagtgttatgagaattaaatgaggccggacatggtggctcacgcctgtaatcccaacactttgcgaggctaaggcgggtgggtcacctgaggtcaggagtttgagaccagcctgaccaagaatgataagaccctgtctctactaaaaataaaaaaaattagctgggcatgctggcgggcacctgtaatcccaactactagggaggctgaggcaggagaatcgcttgaacctgggaggcagaggttgcaatgagccaagatgatgccattgcatgccagccc

SEQ ID NO: 361 - DNA, 540 bp, Homo sapiens
gaggctgccttagcagcagcgtgctccaacaggctctgcaagctgccttccttcatctccctgcagtcctcgccgagcccaggagcccagcccagggtccgggcccctagggcccccctcaccaaggactcagggaagcctctgcacatcaaaccacgtctgtgaggaccccagggaccggcctgcacctacctcagaccctcatccttggagaggaaagaggctctgtccaccactctaccccacaggagggccgcccgccaccaagcctcacctgggggccacagggacactgctctgcctgcctggccctcaaccttccatgaccagcgtgtgcgcagggcctggtcttcctcccccaagccaggcccctgtccccaccccaccaccttccagggtgccaggcagggctggcctccaggcctgtccccgactgccattggcaacagtggccctgcagcccccagccctccccacccaggttttcggcccagtgaagaggccactggccaggcctcccaggcaggtgttttatgttca

SEQ ID NO: 362 - DNA, 415 bp, Homo sapiens
aacctttgcccaattctgaagctgtgggtggaagatgagaagccacacagagagcctccgaataacataggagcctcttggccatcttgaggtgctgatgagatgaggatcggcctgaccctcgagcccagcagagcagggcagcccagaagcagatgacactgtcccaaatgtgtggccaccctggagtcagctcagtccctgcacggtccaggggatccccctctactcggtctgcctggcggagcaaagggtgagccctctagaggaaaatgtcgccatcctagacctctgcagtctttcctatgcgttcagcaacagtttaccgggcatgccacgagacaggaccacagcaccgaaaaccacgagaaaaaaagagcagtagagccacagtgggagaggccgatgttatcag

SEQ ID NO: 363 - DNA, 434 bp, Homo sapiens
gctgctgaacactggtgctgtggtggttttcaaggttaattcctaggctaaccgtatggcctatagtttaaaagcacatctatgttcactgccactctgaaaaagggaattatttctcagtctttcaaggcttgagactaatataggccattgtgattcaggaagaaacccaaggttggagggtgggatgagtaccctctgaaaaagggaatttgctggtgaaaagaggctggatcttgtggaagactgtcttggatggggaagtactacctggagatttcaaattcacttggcctgcaaacaacagagttatccgtatcttccacatgtgaatgtcattgcaagggtgactctagacaaactacaaaccgatggaccgtcaagctccccaggagccccttggatggcagcgttgcttcagagtgtttcctgtt

SEQ ID NO: 364 - DNA, 289 bp, Homo sapiens
tgttcatgaagactcccttacagttgtttttgaaaataattggcaaccagaacgccaggttccatttaatgaagttagattaccaccaccacctgatataaaaaaagaaattagtgaaggagatgaagtagaggtatattcaagagcaaatgaccaagagccatgtgggtggtggttggctaaagttcggatgatgaaaggagaattttatgtcattgaatatgctgcttgtgacgctacttacaatgaaatagtcacatttgaacgacttcggcctgtcaatcaaaat

SEQ ID NO: 365 - DNA, 481 bp, Homo sapiens
  misc_feature (108)..(108): n is a, c, g, or t
  misc_feature (339)..(339): n is a, c, g, or t
  misc_feature (360)..(360): n is a, c, g, or t
  misc_feature (411)..(411): n is a, c, g, or t
gacagtctccagggaaagcacagcctgcatgtgtcattacagcaagcagaagacttcatcctcccagacactacagaggcactgcgggagttggtattaaaataccgngaggacatcattaatgtgcggacagcagcagaccacgtagaagaaaagctgaaggctgagatacttttcctaaaagagcagatccaagcagaacagtgtttaaaagaaaatcttgaagaaactctgcaactagaaatagaaaactgcaaggaggaaatagcttctatttctagcctaaaagctgaattagaaagaataaaagtggaaaaaggacaggctaccgttgaacanctaatgtttgaagagaagaanaaagctcagagattacagacagaattagatgtcagtgagcaagtccagagngattttgtaaagctttcacagacccttcaggtgcagttagagcggatccggcaagctgactccttggaga

SEQ ID NO: 366 - DNA, 475 bp, Homo sapiens
tgaaggcaaggaacaaccacctggcctccattctcttgggggagtcttggcactttgcaaacatcctggccaccatgggcaccaggacacagggatggataccacctaccctcgcctctggaatggcctacccaacccgagaagaatgcacctcattcttccctggcctctttcccacccacagcccccagaggctctagatcaacaatgttagcatgttccagaatggctgtgggaggcctagggaggtgggccccacttagaattgctcccccttcattctgatgcctccctggggaacaaggataatgactttgcatctgcacctggaacggggcctgggggacctggggtctggtgtgccaggcaccaggctgcctctgctcttggaaaactaggaaaggggatcagaaacatcctctccccgctctaggtttcttctcccaaaggggacccaaggctgtgacacttacct

SEQ ID NO: 367 - DNA, 549 bp, Homo sapiens
tcaatacagcaaagcggctcctggagaaggggaaggaggcagtggtccaagagcccgagaggagctggttccagaccaaagaagagaggaagaaggagaaaattgccaaagctctgcaggaatttgacttggccttaagaggaaagaagaaaaggaagaagtttatgaaggatgccaaaaaaaagggggagatgacagcagaggaaaggtctcagtttgaaatcctcaaggcgcagatgtttgctgaacggctagcgaagaggaatcgcagagccaagcgggcccgagcaatgcccgaggaggagccagtgagaggtcctgccaagaagcaaaagcaggggaagaaatctgtatttgatgaagaactcaccaacacaagcaagaaggccctgaaacagtatcgagctggcccttcctttgaagaaaggaaacagttgggcttgccccaccagagacgaggaggaaactttaaatctaaatccagatacaagaggaggaagtagctgtcgtggcctgaagaaattcatgggggcagcccttaaatccctt

SEQ ID NO: 368 - DNA, 212 bp, Homo sapiens
ccgtaacttcagcaaacaggccactgaggtcctaaatgagtatttctactcccacctgagtaacccatatcctagtgaggaggccaaggaggagcttgccaagaagtgtggcatcaccgtgtctcaggtctccaactggtttggcaacaagaggattcgctataagaaaaacatcggaaagttccaagaggaggcaaacatctatgctgtca

SEQ ID NO: 369 - DNA, 320 bp, Homo sapiens
  misc_feature (48)..(48): n is a, c, g, or t
  misc_feature (128)..(128): n is a, c, g, or t
  misc_feature (144)..(144): n is a, c, g, or t
  misc_feature (150)..(150): n is a, c, g, or t
  misc_feature (194)..(194): n is a, c, g, or t
  misc_feature (199)..(199): n is a, c, g, or t
  misc_feature (201)..(201): n is a, c, g, or t
ccagggcccgtggggatgtgtgggttctgtgggtgggtgcctgggaanggaagtggcacaaaggggtgaaggcccaagcaataccaaggagccgtgcacacacattccaggagcttctctgagtcttncctctgggacatgctnctgggnctgggacctggggtcttatggcctggtggaggtgccaattacantgtananggctacgtgggctccctgtaatatcaatgccattcttcgcagaaatagaaacaataaccctaaaatttatatggaaccacaaaaggcccagaatagccaaaccaccctgagcaaaaatt

SEQ ID NO: 370 - DNA, 554 bp, Homo sapiens
  misc_feature (468)..(468): n is a, c, g, or t
gaatctttatcttccaattcttcgctatcattatcatcaaaactctgttttttgcccttctgtcctttcttttttttatcttttgaggtgaattcctcttcattgttttctgttggcttcactgcaacagtttctctgtcagctttgatgccttgagcttccaaagacaattcttccagttctttcaggatatcatcttcatcaaagtcctgcttttttttctcttttttctttttcccttttgacttttgaggctcctgttctttggcagcaccagctccttctatttctgcagccaaggcatcaagatcaatgtcatccttggtgctgtcttcgctcttgtttttctgtttcttccccattgcttgtcaatggcgctcgtggccccagcccctctattcggtctctcacagacccactgtctcccggctgactttggtctccgctcagctcttttcccctcgtgcntgccgccgctcgcacccggctctccacagacccgcgcactggaacaggacacatatggtgtcagttctcaggcgcaagcgcatcgc

SEQ ID NO: 371 - DNA, 361 bp, Homo sapiens
aaaccacgcaaacccaagaggcagagggcggctgagatggaaccacctcccgaacccaagaggcggagggtcggtgacgtggaaccgtcacgcaaacccaagaggcggagggccgctgacgtggaaccatcatcacccgaacccaagaggcggagggtcggtgatgtggaaccgtcacgcaaacccaagaggcggagggccgctgacgtggaaccatcatcacccgaacccaagaggcggagggtcggtgacgtggaaccgtcacgcaaacccaagaggcggagggccgctgacgtggaaccatcattacccgaacccaagaggcggaggttgagctgagaagaggccagtgcactcaagc

SEQ ID NO: 372 - DNA, 275 bp, Homo sapiens
gaacagagcagaaaaatcgtgaaagttataatggctcccaattttccaaaagtaaaggcagaccccaagccacggatccagtaagcttagagaacaccaaataggatacatacttaaaaaaaaaatcaacacctacatatatcatattcaaactgtagaaaaccaaagacaaacacaaaatcttgaaagaagccatagaaaaaaacccagcttacttatacaggaaacgaataagaattacagccttcttgtcagaacacgcaagcaagaagaga

SEQ ID NO: 373 - DNA, 409 bp, Homo sapiens
ttagtccatctaaaactccccaatgcctaaggttctagtcgtggaagggttagctgcagaattccagttcagaagccaacggaggctcagtccagacagggattaaccgacttgtgctggtatctaggtgcttggattgccgagttgagtttgctggaagggaaatggggcggcgtcggggggcccgacaggcctggctgccagtcggcttccgcgaaaacgactcttgctgtccacatagccagccgtgaagccaaactgcaggcctctgccctcccctaaatgtcctcctaggaggcagtcactcgggaggaagatgtgcctgttaccaagtgcttcgtcccggccccagcgcagacctatgaatgaagatggagggagagctgatgtgaaaggcctgggtcccggc

SEQ ID NO: 374 - DNA, 406 bp, Homo sapiens
aacagccactcccatctatgtggaatttctatactctgatgcaaacatttactgccagatcgaccacaaagcagatgtggtctcttaggttcctctgggagctgctcttgtgggttgatggagcgtcctcgaagctccagccctggggacggggaaggacatggagcctgagccagagaaccagctctgagtcctgaggagacacaggcctggggacagggagggatgggagtccctgctgaatatctggagaccctgacaggttgccctgggctccgggtgggccgggacaaaggcctctcatcaccacaggaagcgggggcttgcaaggaaagtgaatgggcctgtggcccacccggggtcaccaggaaaggatctgaataaagaggacccttcctctcattgg

SEQ ID NO: 375 - DNA, 302 bp, Homo sapiens
ccgccttcaagtcccatgaatttacagtctaacaaactgagtcatgttcaccgcatccccgtggtggtacagtcggtgcctgttgtctacacagctgtaaggtcacctggaaatgtgaacaacactattgtcgtgccgcttttggaggatgggagaggccatggcaaagcacaaatggacccccgaggcctatctcccagacaaagtaaaagtgacagtgatgatgatgacctgccaaatgtgaccttagatagcgttaatgaaactggatctacggccctttccatagccagagcagtaca

SEQ ID NO: 376 - DNA, 508 bp, Homo sapiens
cacggggccatgtacaacgggatcgggctgccgacgccccggggcagcggcaccaacggctacgtccagcgcaacctgtccctggtgcggggccgccggggtgagcggcctgactacaagggagaggaggaactgcggcgcctggaggctgccctggtgaagcggcctaatcctgacatcctggaccacgagcgcaagcggcgcgtcgagctgcgatgcctcgagctggaggagatgatggaagagcaggggtacgaggaacagcaaattcaggaaaaagtggcgacctttcgactcatgttgctggagaaggatgtgaaccctgggggcaaggaggagaccccagggcagaggccagcggtcacggagactcaccagttggcagaattaaatgagaagaagaatgaaagactccgtgctgcctttggcatcagtgattcttacgtagatggcagctcttttgatcctcagcgtcgtgcccgagaagctaaacaaccagctcctgagc

SEQ ID NO: 377 - DNA, 563 bp, Homo sapiens
ggccgtcgacaattttaatgggatcaagatcaaaggaagaactatccgagtggatcatgtgtctaactatcgggctcctaaggactcagaagaaatagatgatgtgaccagacaactccaggagaagggctgtggggctcgtaccccctcaccaagtttgtctgagagctctgaagatgaaaaaccacaaaaaagcacaaaaaagacaaaaaaggaaaaaaagaaaaaaaagaaagaaaaagagaaagccgaccgggaggtacaggcagagcaaccatcctcttcgtcacccagacgcaagacagtaaaggaaaaggatgacactggccctaagaagcacagcagcaagaactcagagagagctcagaagtcagagcccagggaggggcagaagctccccaaatccaggacggcctactctggtggagcagaggacctagagagggagctgaagaaggagaaacccaagcacgagcacaagtcctcaagcaggagggaggcaagagaagaaaagaccaggattagggacagaggcggcttcagatgcacattctagctggtat

SEQ ID NO: 378 - DNA, 374 bp, Homo sapiens
  misc_feature (285)..(285): n is a, c, g, or t
taaatcatcttcccaaatacctgcccaaccatcagtagcaaaagttccctatgggaaaggaccttcatttaatcaggaacgtggaacatcttcacatctgccaccacctccaaagttgcttgcacagcagcatccacctccagatcgacaggcagtacctggaagaccaggcccctttccctccaagcagcaagtagctgatgaagatgaaatatggaagcaaagacgaagacaacaatcagaaatttctgcagcagtagaacgtgctcgtaaacggcgtgaagnggaagagcgaagaatggaagaacaaaggaaggcagcttgtgcggagaaactgaaacgattggatgagaagcttggcatcctggaaaaac

SEQ ID NO: 379 - DNA, 400 bp, Homo sapiens
  misc_feature (353)..(353): n is a, c, g, or t
ccctaaaccgcctgtaccagagattaaagttgtgtcaaatctgccagccataaccatggaggaagtagccccagtgagtgttagtgatgcagctctcctggccccagaggagatcaaggagaaaaataaagctggagatataaaaacagctgctgaaaaaacagctacagacaagaaacgagagcgaaggaaaaagaaatatcaaaagcgtatgaaaataaaagagaaggagaagcggagaaaactgcttgaaaagagcagtgtagatcaagcagggaaatacagcaaaacagtagcttcggagaagttaaaacagctgaccaaaactggcaaagcttccttcataaaggatnaaggtaaagacaaggccttaaagtcctctcaagcattcttttctaaa

SEQ ID NO: 380 - DNA, 514 bp, Homo sapiens
  misc_feature (53)..(67): n is a, c, g, or t
  misc_feature (200)..(214): n is a, c, g, or t
  misc_feature (236)..(236): n is a, c, g, or t
  misc_feature (240)..(241): n is a, c, g, or t
  misc_feature (323)..(323): n is a, c, g, or t
  misc_feature (414)..(415): n is a, c, g, or t
cacttggccaagcagggaggaagaagcttaggcagggctctctttccttcttnnnnnnnnnnnnnnnctcccaggggctggcttcaggagggagcatagaaggcaggtgagcaaccagttggctaggggagcagggggcccaccagagctgtggagaggggaccctaagactcctcggcctggctcctacccaccgcccnnnnnnnnnnnnnnnctgctcactacctcctcagggnatgnncgttggccacgtcttccttctgcctgagcttcccccccaccacaggccctttcctcaggcaaggtctggcctcaggtgggcngcaggcgggaaaagcagcccttggccagaagtcaagcccagccacgtggagcctagagtgagggcctgaggtctggctgcttgcccccatnntggcgccaacaacttctccatcctttctgcctctcaacatcacttgaatcctagggcctgggttttcatgtttttgaaacagaaccataaagcatatgt

SEQ ID NO: 381 - DNA, 531 bp, Homo sapiens
gactatatcaggcaacgtttatatattaaaaggcatgatagaccaaatttccatgaaagaagcaggatatccaaattatctcataaggaaatttatgtttggatttccagaaaattggaaagagcacattgataactttctggaacaattaagagatggggtttcgtcatgttggccagactggtctcgaactcctggctacaagtgatccgcctgtctcagcctcccaaagtgttgggattacaggcatgagccactgtgcctggcctgagggctggtgaaaagaacagggaaaagaccaaacaaaaacagaaaactggaagatctgtccgtgacataaggaaatcaatgaaaaatgatgcacgagaaaaccaaacagatactgctcaaagagccaccaccacttacgattttgattgtgataatttggaactgaagagtaataagcacagtgagtcaccaggagctacagaattaaacatgtgccacagtaattgccaaaataaaccaacattaaggttcccagatgac

SEQ ID NO: 382 - DNA, 372 bp, Homo sapiens
  misc_feature (73)..(76): n is a, c, g, or t
  misc_feature (79)..(79): n is a, c, g, or t
  misc_feature (81)..(81): n is a, c, g, or t
  misc_feature (83)..(84): n is a, c, g, or t
  misc_feature (86)..(92): n is a, c, g, or t
  misc_feature (94)..(98): n is a, c, g, or t
  misc_feature (100)..(101): n is a, c, g, or t
  misc_feature (104)..(104): n is a, c, g, or t
  misc_feature (133)..(141): n is a, c, g, or t
  misc_feature (143)..(143): n is a, c, g, or t
  misc_feature (145)..(148): n is a, c, g, or t
  misc_feature (150)..(151): n is a, c, g, or t
  misc_feature (153)..(153): n is a, c, g, or t
  misc_feature (156)..(156): n is a, c, g, or t
  misc_feature (158)..(159): n is a, c, g, or t
  misc_feature (161)..(164): n is a, c, g, or t
cacctccaaagttgcttgcacagcagcatccacctccagatcgacaggcagtacctggaagaccaggcccctnnnnctncnannannnnnnngnnnnngnngangaaatatggaagcaaagacgaagacaacnnnnnnnnntntnnnnannantananngnnnngagaagacgacagaaggggaagagcgaagaatggaagaacaaaggaaggcagcttgtgcggagaaactgaaacgattggatgagaagcttggcatcctggaaaaacaaccatctccagaggaaattagggaaagggagcgagaaaaagaacgggagcgtgagaaagaacttgaaaaagaacaagaacaggagcgagagaaggagaggg

SEQ ID NO: 383 - DNA, 389 bp, Homo sapiens
  misc_feature (212)..(212): n is a, c, g, or t
ggcccttggaagtagctggagctgctgtcagcgcaggccatggcctgcctgccaagtttgtgatccactgtaatagtccagtttggggtgcagacaagtgtgaagaacttctggaaaagacagtgaaaaactgcttggccctggctgatgataagaagctgaaatccattgcatttccatccatcggcagcggcaggaacggttttccaaancagacagcagctcagctgattctgaaggccatctccagttacttcgtgtctacaatgtcctcttccatcaaaacggtgtacttcgtgctttttgacagcgagagtataggcatctatgtgcaggaaatggccaagctggacgccaactaggctgagcaatgacagaaccagctgcac

SEQ ID NO: 384 - DNA, 257 bp, Homo sapiens
cttttcccttcaacactgcttggagctgtgttttccagggcctgagcaggcatctcctggggagcatgcagttcaccggcctttgccagcccaggctgggaccctccaggtggtggggcaggtgcttccatagcccctcctggctccttggcttcccactctgccaagcttttccagcagcattgactctcctggggctgaatgtgacaggcttgtggtgttcctgtgccactccacaatggcctcctttaagaggg

SEQ ID NO: 385 - DNA, 97 bp, Homo sapiens
tagttttaccctactgatgatgtgttgttgccatggtaatcctgctcagtacgagaggaaccgcaggttcagacatttggtgtatgtgcttggctga

SEQ ID NO: 386 - DNA, 281 bp, Homo sapiens
ggctgtggcaacggacaaaactctggcaccatcctcagaacaggaacagcctgaggggctctggccacccctagcctcacctctacatcccctggaagtacaaggactcatctgtggtccctgcttctcctccctccctgaacaccttggctctgttcccaagcagctggacttccagagacatggctcagatcctggatttgcagggagttggggccactgaactccaagataaagacaccatgaggggactgaaggtgggcaaggtgagagttaaggat

SEQ ID NO: 387 - DNA, 423 bp, Homo sapiens
  misc_feature (183)..(188): n is a, c, g, or t
  misc_feature (190)..(191): n is a, c, g, or t
  misc_feature (193)..(194): n is a, c, g, or t
  misc_feature (196)..(196): n is a, c, g, or t
  misc_feature (199)..(205): n is a, c, g, or t
  misc_feature (215)..(215): n is a, c, g, or t
  misc_feature (221)..(221): n is a, c, g, or t
  misc_feature (379)..(379): n is a, c, g, or t
  misc_feature (383)..(383): n is a, c, g, or t
  misc_feature (388)..(391): n is a, c, g, or t
  misc_feature (394)..(394): n is a, c, g, or t
taagagctagtcattcttgccagcctctgacagtgtgagatctgcagcagtgtttactagttcattttctgtgaagtcagtccttgataatttgtggtacaaagaaaggaaataacaagtctgacagtaatcttcctacctttgtagagactccatcatcccttctgaatccctgttggcccnnnnnngnngnngnagnnnnnnngggtgggctncccttncctgcacttcctgcgcttggagacattggagagcccacattgaaaatctcttcagttaaccacatttaagtcccttcagtccaaagaggaaatggccactggagtctgctttagttcccacaagctttgggttgctccttcctcctgttcacatgttnatgnctttnnnngtncagaggggcatggaagctactgagagact

SEQ ID NO: 388 - DNA, 527 bp, Homo sapiens
gggattttctacccagagacctgcatgttctctccaacgaccagaatattctacccaaatgtcaggaccaagattttctaccaaaatatcagaaagtacactttaaggagccatactctgatatgacagatgagaaagggagagaagacttttctctggcagactatcagtgtttgcctcccaaatcccaggaccaggatgacatcaaaaatcagcaacctgcatcttttatgagagaagaaagagtgagagaggaattgcctctggactatcatcaatatgttgtacctaaaatccaggaccaagactcccctagagaacagaacaagcatatcaaactaccctcatcttttgagaaatgggagattgcaagaggaaatactcctggagtgccattggcttatgataggtatcaatcaggattgagcactgaattccaagctccactggcatttcagtctgacgtggataaagaagaagataagaaagagcgtcaaaagcagtacctgagacatagacgacttttc

SEQ ID NO: 389 - DNA, 516 bp, Homo sapiens
  misc_feature (84)..(84): n is a, c, g, or t
  misc_feature (105)..(105): n is a, c, g, or t
  misc_feature (111)..(111): n is a, c, g, or t
  misc_feature (113)..(113): n is a, c, g, or t
  misc_feature (115)..(115): n is a, c, g, or t
  misc_feature (119)..(119): n is a, c, g, or t
  misc_feature (125)..(125): n is a, c, g, or t
  misc_feature (129)..(129): n is a, c, g, or t
  misc_feature (132)..(132): n is a, c, g, or t
  misc_feature (134)..(134): n is a, c, g, or t
  misc_feature (136)..(136): n is a, c, g, or t
  misc_feature (141)..(141): n is a, c, g, or t
  misc_feature (148)..(149): n is a, c, g, or t
  misc_feature (159)..(159): n is a, c, g, or t
  misc_feature (162)..(162): n is a, c, g, or t
  misc_feature (175)..(175): n is a, c, g, or t
  misc_feature (179)..(179): n is a, c, g, or t
  misc_feature (199)..(199): n is a, c, g, or t
  misc_feature (346)..(347): n is a, c, g, or t
tttctttgatccaggggcttctagatatgtgacaagattataagtaccatctaatgaaaagaaatattaacgattcagttagantctgaatataagagtaagtgnaatttngnanagtnagtgancccntgntnanggtancagtggnnccccaagccnttnttcaaggtggtanccancaaagactatccaggtgttnctagagggcccaaaagttgacacgacttgtctcagctcacagacttaagcaataggacagctggaactgagcccaagacttcagtaataacagcagcccttattgagcacctggtctttgtgtggcattatcccttttgcctcctcnnactggccctcacagcaagcctgtgatgtgaacatcacgtctctcactctggacaaggggacgaggaggttcaggcaagtgaaatgactgactctctagcattcagtgtcagtgcaggacgtccatctgagctcattttggtcactgtcatgctgcttccgaaggtcttc

SEQ ID NO: 390 - DNA, 561 bp, Homo sapiens
  misc_feature (41)..(41): n is a, c, g, or t
  misc_feature (43)..(44): n is a, c, g, or t
  misc_feature (60)..(60): n is a, c, g, or t
  misc_feature (92)..(92): n is a, c, g, or t
  misc_feature (105)..(106): n is a, c, g, or t
  misc_feature (154)..(154): n is a, c, g, or t
  misc_feature (181)..(183): n is a, c, g, or t
  misc_feature (185)..(185): n is a, c, g, or t
  misc_feature (287)..(306): n is a, c, g, or t
  misc_feature (324)..(324): n is a, c, g, or t
  misc_feature (341)..(341): n is a, c, g, or t
  misc_feature (346)..(346): n is a, c, g, or t
  misc_feature (420)..(420): n is a, c, g, or t
gcaggtcatgaacacccacttcaactctcttcacatcgtcnanncttacggggccttcgnaagcatcaccaaggagcgggcggaggtgatcntgcagggcacagnnagctccaacgccagcgcccccgatgccatgtgggaggactacgagttnaagtgcaagccaggtgaccccagcagnnngnccctgcctcatctccccgtaccactaccgcctggactggctgatgtggttcgcggccttccagacctacgagcacaacgactggatcatccacctggctggnnnnnnnnnnnnnnnnnnnnccgaggccttgtccctgntggcacacaaccccttngcggncaggcccccgcccaggtgggtccgaggagagcactacaggtacaagttcagccgtcctgggggcaggcacgccnccgagggcaagtggtgggtgcggaagaggatcggagcctacttccctccgctcagcctggaggagctgaggccctacttcagggaccgtgggtggcctctgcccgggcccctctagacgtgcaccagaaataaaggcgaag

SEQ ID NO: 391 - DNA, 438 bp, Homo sapiens
  misc_feature (308)..(308): n is a, c, g, or t
  misc_feature (320)..(320): n is a, c, g, or t
aaaacaagccaggtcctaacatagaaagtgggaatgaagatgatgacgcctccttcaaaattaagacagtggcccaaaagaaggcagaaaagaaggagcgcgagagaaaaaagcgagatgaagaaaaagcgaaactgcggaagctgaaagaaaaagaagagttagaaacaggtaaaaaggatcagagtaaacaaaaggaatctcaaaggaaatttgaagaagaaactgtaaaatccaaagtgactgttgatactggagtaattcctgcctctgaagagaaagcagagactcccacagctgcagaagangacaatgaaggngacaaaaagaagaaagataagaagaaaaagaaaggagaaaaggaagaaaaagagaaagagaagaaaaaaggacctagcaaagccactgttaaagctatgcaagaagctctggctaagc

SEQ ID NO: 392 - DNA, 581 bp, Homo sapiens
  misc_feature (408)..(410): n is a, c, g, or t
cgccatcgtagtagaagcagggagcggaagaagtctcgatccaggagtagggagcggaagaaatcgagatccagaagcagagagaggaagaaatcgagatccagaagcagggaaagaaaacggcggatcaggtctcgttcccgctcaagatcaagacacaggcataggactagaagcaggagtaggacaaggagtaggagtcgagatagaaagaagagaattgaaaagccgagaagatttagcagaagtttaagccggactccaagtccacctcccttcagaggcagaaacacagcaatggatgcacaggaagctttagctagaaggttggaaagggcaaagaaattacaagaacagcgagaaaaggaaatggttgaaaaacaaaaacaacaagaaatagctgcagcnnntgcagctactggaggttctgttctcaatgttgctgccctgttggcatcaggaacacaagtaacacctcagatagccatggcagctcagatggcagccctgcaagctaaagctttggcagagacaggaatagctgttcctagctactataacccagccgctgttaatccaat

SEQ ID NO: 393 - DNA, 461 bp, Homo sapiens
gaagcagcagccagcgaaatagaagcagtttctgttgccatggagaaagaatttgagctacttgataaggcaaaacgaaaaacccagaagagaggcataacaaataccttagaagagtcatcaagcctgaaaagaaagaggctttcagattctaaacgaaagaatacatgcggtggatttttgggggagacctgcctctcagaatcatctgatggatcttcaagtgaacatgctgaaagttcatctttaatgaatgtacaaaggagaacagctgcgaaagagccaaaaaccagtgcttcagattcgcagaactcagtgaaggaagctcccgtgaagaatggaggtgcgaccaccagcagctctagtgatagtgatgacgatggagggaaagagaagatggtcctcgtgaccgccagatctgtgtttgggaagaaaagaaggaaactaagacgtgcgagggg

SEQ ID NO: 394 - DNA, 474 bp, Homo sapiens
aaccacctggacccatttgggcatattattctaaattccatgcacaaataccagcctagattacacatcgtgaaagcggatgaaaataatggatttggctcaaaaaatacagcgttctgcactcacgtctttcctgagactgcgtttatagcagtgacttcctaccagaaccacaagatcacgcaattaaagattgagaataatccctttgccaaaggatttcggggcagtgatgacatggagctgcacagaatgtcaagaatgcaaagtaaagaatatcccgtggtccccaggagcaccgtgaggcaaaaagtggcctccaaccacagtcctttcagcagcgagtctcgagctctctccacctcatccaatttggggtcccaataccagtgtgagaatggtgtttccggcccctcccaggacctcctgcctccacccaacccatacccactgccccaggagcatagccaaatt

SEQ ID NO: 395 - DNA, 244 bp, Homo sapiens
  misc_feature (75)..(75): n is a, c, g, or t
atatggtcaaaaacctctgatccaattcaacctactcatcttaacgattttatcagcatttaataagtttgtttnggccatcatgtgttatagttttgtttgtggttttgacacctcattagaggtttcatcagtgtaaggagccaacctaagagctcttctcacaagtttcccaagagagaaattgcccctccaaatgtgaggagtctcactttatatagatagcatccacacttcttgcagt

SEQ ID NO: 396 - DNA, 364 bp, Homo sapiens
  misc_feature (183)..(184): n is a, c, g, or t
  misc_feature (294)..(294): n is a, c, g, or t
cttcctccctatgtctgtttatggagtgcctgctgtttatcaggctgtatcctagtgagataaataagatgtgatctaaatttattcttagagaagaataaagaaaaacgggtattataccagatatctatttagggcacagttggaataaaaagcaagtggtcaagaaaggcttcgtggaanntatcgctcctgctgagtcttgaaagcatccataggtgtgtgtgccaggttgacgagaagagcagtgtgaacagaggctgtgaaagagcctgactaagctgagatgtgagnccaggaaggcccattggagaccggctattaagacttgatcctaaaggcattgaggaaaccttggtggctg

SEQ ID NO: 397 - DNA, 503 bp, Homo sapiens
  misc_feature (31)..(31): n is a, c, g, or t
  misc_feature (53)..(53): n is a, c, g, or t
  misc_feature (74)..(74): n is a, c, g, or t
  misc_feature (77)..(77): n is a, c, g, or t
  misc_feature (94)..(94): n is a, c, g, or t
  misc_feature (104)..(104): n is a, c, g, or t
  misc_feature (109)..(109): n is a, c, g, or t
  misc_feature (118)..(118): n is a, c, g, or t
  misc_feature (128)..(128): n is a, c, g, or t
  misc_feature (190)..(190): n is a, c, g, or t
  misc_feature (412)..(412): n is a, c, g, or t
  misc_feature (439)..(439): n is a, c, g, or t
  misc_feature (445)..(450): n is a, c, g, or t
  misc_feature (452)..(459): n is a, c, g, or t
gaaccgtgattaccgggatgcacaggagttngctgctgatgtacggcttatgntctccaactgctataagtacnatnccccagatcacgatgtngtggcaatgncacgnaagctacangatgtatttnagttccgttatgccaagatgccagatgaaccactagaaccagggcctttaccagtctctacngccatgccccctggcttggccaaatcgtcttcagagtcctccagtgaggaaagtagcagtgagagctcctctgaggaagaggaggaggaagatgaggaggacgaggaggaagaagagagtgaaagctcagactcagaggaagaaagggctcatcgcttagcagaactacaggaacagcttcgggcagtacatgaacaactggctgctctgtcccagggtccnatatccaagcccaagaggaaaagaganaaaaannnnnnannnnnnnnagaaaagcggttacaagatgtcagcggacagctcaattctacta

SEQ ID NO: 398 - DNA, 543 bp, Homo sapiens
gaagcatgctgcctatgcttggcctttctataaaccagtggatgcttctgcacttggcctgcatgactaccatgacatcattaagcaccccatggacctcagcactgtcaagcggaagatggagaaccgtgattaccgggatgcacaggagtttgctgctgatgtacggcttatgttctccaactgctataagtacaatcccccagatcacgatgttgtggcaatggcacgaaagctacaggatgtatttgagttccgttatgccaagatgccagatgaaccactagaaccagggcctttaccagtctctactgccatgccccctggcttggccaaatcgtcttcagagtcctccagtgaggaaagtagcagtgagagctcctctgaggaagaggaggaggaagatgaggaggacgaggaggaagaagagagtgaaagctcagactcagaggaagaaagggctcatcgcttagcagaactacaggaacagcttcgggcagtacatgaacaactggctgctctgtcccagggtccaatatccaa

SEQ ID NO: 399 - DNA, 469 bp, Homo sapiens
gttggcttggctgttgacatggatgaaattgaaaagtaccaagaagtggaagaagaccaagacccatcatgccccaggctcagcagggagctgctggatgagaaagagcctgaagtcttgcaggactcactggatagatgttattcgactccttcaggttatcttgaactgcctgacttaggccagcctacagcagtgctgtttactcattggaggaacagtaccttggcttggctcttgacgtggacaaaattaaaaagaaggggaaggggaaaaaaagaaggggaagaagatcaaagaaggaaagaagactgggacagacacagaaggggaagaagatcaaaaccaccatgccccaggctcaacggcgtgctgatggaagtggaagagcgtgaagtcttacaggactcactggatagatgttattcgatccgtcatgtactttgaactacctgactcattccagcac

SEQ ID NO: 400 - DNA, 481 bp, Homo sapiens
tgcagggccttgtgcggcagaaggagcgggcgctggaggatgcgcaggcggtgaacgagcagctttctagcgagcgcagcaacctggcccaggtgatccgccaggagttcgaggaccggctggcagcctctgaggaggagacgcggcaggccaaggccgagctggccacgctgcaggcccgccagcagctggagctggaggaggtgcaccggagggtgaagacagccctcgcgaggaaggaggaggccgtgagcagcctccggacacaacatgaggctgcggtgaagcgggccgaccacctggaggagctgctggagcagcacaggaggcccacgccaagtaccaagtgaccagggatgccgggaacactgtcgaagaacggaaggcagaggacagaggctggacgtgggcccagaggcccacagggacgcccacctgccccccacagaggctggtggttgagatgcccacggctaagcac

SEQ ID NO: 401 - DNA, 146 bp, Homo sapiens
gatactacttgggggagggcagctaatgaaaccttcaagctctatgcagtccacagacgtgagctctgtagagttcgcagaggtgggtaagtacccagccagcacacccagttgaattcagccaggatttattgagttggcatcac

SEQ ID NO: 402 - DNA, 497 bp, Homo sapiens
cggggcccttggaggaggatgatctggagcccctgaccttggccccggccccagcaccccggccccctcaggacctcatcggcctgcgactggcccaggagaaggccttaaagcggcagctggaggaggaacagaagctgaagccgggaggagtgggagccccctcctcttcctccccctctccctctccgtcggcccggccaggcccgcccccgtctgaggaagccatggatttccgggaggaggggcctgagtgcgagaccccgggcatcttcatcagcatggatgacgactcggggctgaccgaggccgcgctgttggactctagtctcgagggccccctacccaaggagacggcagcgggcgggctgaccttgaaggaggagcggagcccccagaccctcgcacctgttggagaagatgctatgaagactcccagcccggctgccgaggacgccagggaacccgaggccaaggggaacagctgacggggctcg

SEQ ID NO: 403 - DNA, 391 bp, Homo sapiens
cgtccgagtgtgagtcagtcagcgacaaggctcccagccctgccaccctgccagccacctcctcctccctgcccagcccagccaccccatcccatggctctcccagttcccatgggcctccagccacccaccctacctcccccactcccccttcgacagccagtggggccaccacagctgccaacgggggtagcttgaactgcctgcagacaccatcctccaccagcagggggcgcaagatgactgtcaacggcgctcccgtgccccccttaacttgaggccagggaccctctcccttcttccagccaagcctctccactccttccactttttctgggcccttttttccacctcttctactttccccagctcttcccaccttgggggtggg

SEQ ID NO: 404 - DNA, 562 bp, Homo sapiens
gatgaccaactgctggctgggcagggcccgcgtcctcccccagattctagcatgggtcatcctgggcctcacctgctgatgccagggccatcgtcttttctcagtccttctcctttccaaccatacttggctttggggatgaccccagacaccccctgaatccaggtcagaggtcagcccacctttctttctgcttgcaaagcctatagacccttctcagagcggtcctcatggctgggttttctgggacacatgtcgaggacagaaggtggagggtggtggagctgctgctggaagaaggggaaggaagagtggcccctccccgagttctaagtcaggatgaggcccacctgtccaaggtatcggaacctacccaggggaccctcagatcctccacccactcccccatccattacgatgccagcttccagccttgcccaggtcagagctgtggcagaggagaggcagccaggccctgttcctgctcagctcctgctcaggaaggccaggcctgacagatgtttgggagaggaataaagttgtgttgttgtggggcatgcag

SEQ ID NO: 405 - DNA, 553 bp, Homo sapiens
attatcaactctacaaagtgccccccagcagcagacctcctcgtctccacctccacctctgctgactccaccgccaccactgcagccagcctccagtatctctgaccacacaccttggcttatgcctccaacaatccccttagcatcaccatttttgcctgcttccactgctcctatgcaagggaagcgaaaatctattttgcgagaaccgacatttaggtggacttctttaaagcattctaggtcagagccacaatacttttcctcagcaaagtatgccaaagaaggtcttattcgcaaaccaatatttgataatttccgaccccctccactaactcccgaggacgttggctttgcatctggtttttctgcatctggtaccgctgcttcagcccgattgttttcgccactccattctggaacaaggtttgatatgcacaaaaggagccctcttctgagagctccaagatttactccaagtgaggctcactctagaatatttgagtctgtaaccttgcctagtaatcgaacttctgctggaacatcttcttca

SEQ ID NO: 406 - DNA, 522 bp, Homo sapiens
aagactggtatcactctgtctggcaatggtgttgctggcaccaatatcataataggcataattgctggcaccattttagtgctggccctcatattaggaataactgcgtggggttataaaaactatcgagaacagaggtcaaatgggctctctcattcttggagtgaaaggattccagacacaaaacatatttcagacatctgtgaaaatgggcgacctcgaagtaactcttggcaaggtaacctgggaggcaacaaaaagaaaatcagaggcaaaagatttagacctcggtctaattcaactgagtatttaaacccatggttcaaaagagactataatgtagctaagtgggtagaagatgtgaataaaaacactgaagaaccatactttaggactttatctcctgccaagtctccttcttcatcaactgggtctattgcctccagcagaaaatacccttacccaatgcctccacttcctgatgaggacaagaaagtgaaccgacaaagtgccaggctatgg

SEQ ID NO: 407 - DNA, 510 bp, Homo sapiens
aaaaaaattcgtcaaatggctcaagaaagaggaaaaagaagtgcaacttcaggattaaccactgaggacctgaacctaactgaaaacatttctcaaggagatagaataagtgaaagaaaattggatttattgagcctcaaaaatatgagtgaagcacaatcaaagaatgaatttctttcaagagaactaattgaaaaagaaagagatttagaaaggagtaggacagtgatagccaaatttcagaataaatgctatagaatcaaagaatgcagaaggaatctttgatgcgagtctgcatttgaatgcccaagttgatcagcttaccggaagaaatgaagaattaagacaggagctcagggaatctcggaaagaggctataaattattcacagcagttggcaaaagctaatttaaagatagaccatcttgaaaaagaaactagtcttttacgacaatcagaaggatcgaatgttgtttttaaaggaattgacttacctgatgggatagcacc

SEQ ID NO: 408 - DNA, 334 bp, Homo sapiens
cgctcccagccaagcatgtgagagttttaaatcaaatgttaccttgtccctattagccttaccactgctaaatatctacacggttccctgttaaggagagtttctaaatgactctcttgagaaatcctggataaatggagaatggagcatttttcctgcctctaagctttgctccactgcaatctttcacatgctgtgtatccagagggtgactgccagatagcttcttgaagaaagggaggaggaaacggtcattttcttgctgcgctttctaacacccaacagaggaaatgcacagcataggtgtgtgggagtttggctgacttatggtaaa

SEQ ID NO: 409 - DNA, 464 bp, Homo sapiens
aaccagacccaagtgctgagacaacagcaggatgaggcctacctggcctctctcagagctgaccaggagaaagaaagaaagaaacgggaggagcgggagcgtaagcggcggaaggaggaggaggtgcaacagcaaaagttggcagaggagagacggcggcagaatttacaggaggaaaaggaaaggaagttggaatgcctgccccctgaaccttcccctgatgaccctgaaagtgtcaagatcatcttcaaattacctaatgattctcgagtagagagacgattccacttttcacagtctctaacagtaatccacgacttcttattctccttgaaggaaagcccagaaaagtttcagattgaagccaattttcccaggcgagtgctgccctgcatcccttcagaggagtggcccaatccccctacgctacaggaggccggactcagccacacagaagttctttt

SEQ ID NO: 410 - DNA, 561 bp, Homo sapiens
  misc_feature (33)..(33): n is a, c, g, or t
  misc_feature (35)..(35): n is a, c, g, or t
  misc_feature (57)..(57): n is a, c, g, or t
  misc_feature (60)..(60): n is a, c, g, or t
  misc_feature (68)..(68): n is a, c, g, or t
  misc_feature (73)..(73): n is a, c, g, or t
  misc_feature (376)..(376): n is a, c, g, or t
  misc_feature (447)..(447): n is a, c, g, or t
aaagctagccccaagatcagagcctgaggtaanangaaaaggaaggcagacagaaanagnagggaaanggganggtcattccaattttaaggtttatttggttgaagaggtgtcaaaaatttaaccagcattcccttttgttcacttctccaaagtctcagaatggggcaaacttcacaacaaatgggcagcagtttttggatctgctctccaaggcacaatttttctaaattatctaaactttaggtccctgctttcctcaccaaccagagactttggagaaataaagagatatcttgacattagaaaggtgatcaaactattaccatttcattaagcacaaaaccaggcaggttttagtagaaataaggataanaggattacaccacagcaacatgggacctgatcatagtaccaaagtcttcaggtaaggtgtcaggctcctangtcttattaccaaaaatagctcaaacaaaaaccgagcttatataaagattaaagaggagaaattctgcaataatcatatccaaaaaagattaagcaggtttcagatctaccatg

SEQ ID NO: 411 - DNA, 475 bp, Homo sapiens
gaacaatagcttggtgccttaacacctccacagagagatgaccaatggaatttttcttaatatcattattgactcactttttttattgtggtagaatatgcataacacaaaatttacagttttaaccatttttattatacatttcagtggcataagtacattaacaatgttgtgcagccatcaccaccatccatctccagaactttttcaacatcccaaactgaaagtcttggccaggcatggtggctcatgcctgtaaacccagcactttgggaggctgaagcgggtggatcacctgaggtcagaagtttgagaccagcctggccaacatggtgagaccctgtctctgctaaaaatacaaaaattagccagatgtggtggcataagcctgcagtcccagctacttgggaggccgaggcacgagaattgcttgaacccaggaggcagaggttacagtaaaccgaaattgtgccac

SEQ ID NO: 412 - DNA, 496 bp, Homo sapiens
  misc_feature (26)..(26): n is a, c, g, or t
  misc_feature (32)..(32): n is a, c, g, or t
  misc_feature (41)..(41): n is a, c, g, or t
  misc_feature (72)..(72): n is a, c, g, or t
  misc_feature (96)..(96): n is a, c, g, or t
  misc_feature (197)..(214): n is a, c, g, or t
  misc_feature (256)..(256): n is a, c, g, or t
  misc_feature (417)..(439): n is a, c, g, or t
attctactcttgagttgacataagtncatctnaagcttctnatctccgatgagaacaatgggggacaccaancagaatataaaacccatgattgantacatcaaattgctaacatggcagtaaacagacatgaggtgaagatggagaagaaggaaacccaggacgaaagtcagcctcgcatttggaacccatttccnnnnnnnnnnnnnnnnnnttccagaaggaactactgagatgcaaagaagcacagcagctnttgcacacatgcgtgggattagatggaaaacaagtggattgagggtctgccaatgaaagcgacccatactgaagtccactggctctggttgagacccagaagagtcatgcatcagaataaaggtggacaggaaataccctggcctttgtagggactgagcnnnnnnnnnnnnnnnnnnnnnnngcctgtatggaggacccctgaccatcccccagaagtagactcccatctcttctgcag

SEQ ID NO: 413 - DNA, 456 bp, Homo sapiens
gggaggcgagggaggctctgtatgaaacagaagagcagggacataaaggaaaatgtcagtgtttacatgggacctatggaaacaaaggctggcgggcgccagctgactccagagtaagagagggcccttcccctgccaggacccacggtgctatccattcagtctcttcctcagttaatctcggagcttcctattccatgttgaggtttgtgggcccctctagaggagggctagttctatacttaaattgattcccaggggcctttttttttttttttttttttttttttgatcaaaaggggtgtggggatgggggtgtctacggttaagcaacagatacctccttccctttgtaaatagtatttttatacttcatcctcgcctctcaggctttagatacgaaatctccagaatggaagggggtggggattttctgttcctccctggagtgggtga

SEQ ID NO: 414 - DNA, 250 bp, Homo sapiens
gacagagagcgagaccgtgatcgggacagagaaagagaacgcaccagagagagagagagggagcgtgatcacagtcctacaccaagtgttttcaacagcgatgaagaacgatacagatacagggaatatgcagaaagaggttatgagcgtcacagagcaagtcgagaaaaagaagaacgacatagagaaagacgacacagggagaaagaggaaaccagacataagtcttctcgaagtaatagtagacgtc

SEQ ID NO: 415 - DNA, 368 bp, Homo sapiens
tgaaggtccgatttcaggccagcatacacctcgggccatccaggagcgacagaaaatacagcgggactatggacgcctacagaaccatcgccagggaggaaggagtcaggggcctgtggaaaggaactttgcccaacatcatgaggaatgctatcgtcaactgtgctgaggtggtgacctacgacatcctcaaggagaagctgctggactaccacctgctcactgacaacttcccctgccactttgtctctgcctttggagccggcttctgtgccacagtggtggcctccccggtggacgtggtgaagacccggtatatgaactcacctccaggccagtacttcagccccctcgactgtatgataaag

SEQ ID NO: 416 - DNA, 365 bp, Homo sapiens
aattccaagtgaagcagcacagtgctgagaaacagttcatccatggtgccatgttaaagaagttggaaatatatcttgaaaatcctatcttccttttaggcttgaatatgatgctgaacagtaagtttgttaaatcttggaacttaaaacaatcctgctttctcaagtactattctaacattgcgctttataagggatgatatttctaccacctcactcatatttttagctgaaatgattttcctggtatgtctgttattttgtggaaaaagaaatattgtgtaaaatgggtgctgccaaaattccaggccattttgcagggactctgaagtgacctttagtagtaatagtcttatgtgcagtaa

SEQ ID NO: 417 - DNA, 536 bp, Homo sapiens
aataatttataccatcttttcagacaagaatgtacagcaaaaataaggggaacagtagtatactgagagtgtgtgtatgtataatgtatgcctttccaagcttgccagtctttttggctttgaacactgcccatcagctacagtcattactgttccccaacccacaactatcttttaagaagtcttagttcacagtgaaaggaatgatgattttgaaattatggatttatattaatggcactataaaccaatggtaatggtaatttttaaacttgctaaatattgagaaactaaactactaagttaataaattatatatagcagtgtagctgttctctctagatggtgtctcacaatggatttctgttgcttgactattttcttagtgaatatttatactaaggtagtgactgagatttggtgatctggctgagtattttgaaacacattttgaataatatggcttagtgttaacggggacttaaatatgatttttttttcttactcatttcaccttccctgtactgtatgtttgg

SEQ ID NO: 418 - DNA, 422 bp, Homo sapiens
ttacagcttgttttccaggcatcgaataactgttgagattgttctactgttgtcgtatattcttctatattgaattctggttaatttggagtaactaattctgtggctgttgtgagtcttcagcaccctcccatgtaccttatatccctctctgaaacagaacagctccaatagcaacaagctagttgttctgccagatgtttctatgtggattctgtaatgttcctccatacagttaaaacatcctaacttgtttttcaagctcactcaggcctacgccaaacgtttctgttttttttaaccatgaggtttaatttatttttgtgataggagggatatttacatattttagtggaccacattttaagttggatggtgtgctctaaaatactgaaaaacaatagcccatatacctatgtatt

SEQ ID NO: 419 - DNA, 496 bp, Homo sapiens
  misc_feature (36)..(36): n is a, c, g, or t
  misc_feature (134)..(134): n is a, c, g, or t
atctcgcagaagctttattgacctatgagactttgnatgccaaagagattcaaattgttcttgaggggaaaaagttggaagtgagatgataactctcttgatatggatgcttgctggttttattgcaagaatanaagtagcattgcagtagtctacttttacaacgctttcccctcattcttgatgtggtgtaattgaagggtgtgaaatgctttgtcaatcatttgtcacatttatccagtttgggttattctcattatgacacctattgcaaattagcatcccatggcaaatatattttgaaaaaataaagaactatcaggattgaaaacagctcttttgaggaatgtcaattagttattaagttgaaagtaattaatgattttaagtctggttactctactagatttgataaaaattgtgcctttagccttctatatacatcagtggaaacttaagatgcggtgtttgagattgcggtgtttgggattgcggt

SEQ ID NO: 420 - DNA, 190 bp, Homo sapiens
agctgtctcctgaacagggaagctcaggcattgagatgctggagacagacacattcaaattgcactgctaccagacactgacagggatcaagtttgtggttctagcagatcctaggcaagctggaatagattctcttctccgaaagatttatgagatttactcagactttgccctcaagaatccattcta

SEQ ID NO: 421 - DNA, 509 bp, Homo sapiens
  misc_feature (93)..(93): n is a, c, g, or t
  misc_feature (336)..(339): n is a, c, g, or t
  misc_feature (341)..(349): n is a, c, g, or t
ttccagtcactgattgtggttttagaatcttctgtggctgacttcttgtattcaactctggtttattatcttaatcttcaacttcagacatanatttgtgtgtttatatgctcacaggtggactgagaaatcagttacatcttaagtgacctacagggtatatgttggcaaaagcagactgtgtatatgtcttataaagttgaatttatgttcagtgtgtttggaagtgtatagcatgtaaattatttcatatatgatttaaaggtaattaaatgttcacattttactttgaatgtttttcttctggataaaacaaatggaatcaaaaaaaaaaannnnannnnnnnnncacctaggcaagtagacttgcccattacattaacataacagcataaggttgaggagtttattttccaaaagttgttgataaataatacctgtttcatacaaaaataatttccagaatatttaaaataggtatagtgggctaaaaggccatcagatgtagg

SEQ ID NO: 422 - DNA, 547 bp, Homo sapiens
agctgagctggacacactaaacgaggattcctataaggactccacgctgatcatgcagttgctgcgagacaacctcaccctctggacgagcgaccagcaggatgaagaagcaggagaaggcaactgaagatccttcagatcccctggcccttccttcacccaccacccccatcatcaccgattcttccttgccacaatcactaaatatctagtgctaaacctatctgtattggcagcacagctactcagatctgcactcctgtctcttgggaagcagtttcagataaatcatgggcattgctggactgatggttgctttgagcccacaggagctccctttttgaattgtgtggagaagtgtgttctgatgaggcattttactatgcctgttgatctatgggaaatctaggcgaaagtaatggggaagattagaaagaattagccaaccaggctacagttgatatttaaaagatccatttaaaacaagctgatagtgtttcgttaagcagtacatcttgtgcatgcaaaaatgaattcacccctccca

SEQ ID NO: 423 - DNA, 443 bp, Homo sapiens
tctttattgattagcactgaggattttaacattgtgatatattatatatttataatttaccatctcttgatgagactcttatttctttatataggtcagtcttgcaagtaccattttataagcagctgtgaaatttaagtgaaatgttctttgtaaacatttgtactattttaaatgaataatgaccttatgaagtatgctatctgtaggctgaaattataggtacatctgttttcactatatgatattaagaaagcgtgaaatgacttaaatgttcatttttttctgtatagatactttatcatgttttcatgattttaggaattactgctttgttgatattcaaagtgtgaaactaaaagtttatggttgtactttaattcttggcatgttgcctctatgtcccatttaaaataaaatacattctcattaactttagatgg

SEQ ID NO: 424 - DNA, 501 bp, Homo sapiens
catcacagatcctgcagatatatatttatatttatacatatatatttatgaaataattcttactcacaaaatatatttctgataaacattaagatattaaatctgatgcacaaactttaatttggccattaatcttttttatttaaaaatttaaatttgtttttaaaattgtatatagtttttaaaatctcacacatgcttcgatacttccttgttaagaattcttaataactactaaaactgatttttaatagttgctgatatatatttggtttgtttgggtatacttttcaaaaccatttttgaatgtccaaacatctgatttaaagtttctgtttatctttctgaccaaaggagcaagaggtataatggatatggcattcattaaaatctttactatgtacaaaaacagtaatatttacagcatcagtaaatatttttaagtggtacttctaaatcataaaagttggggaaagagacctttaaaatcttgtggtgttg

SEQ ID NO: 425 - DNA, 359 bp, Homo sapiens
cctgctgccggatgacattgaggacgagtccacgggcctgaagaagattgaggaacagttgactttggaaaagttgcatgagtggactaaacctgagaatctcgatttcattgaagttaatgtcagcttgcccaggttcaaactggaagagagttacactctcaactccgacctcgcccgcctaggtgtgcaggatctctttaacagtagcaaggctgatctgtctggcatgtcaggagccagagatatttttatatcaaaaattgtccacaagtcatttgtggaagtgaatgaagagggaacagaggcggcagctgccacagcaggcatcgcaactttctgcatgttgatgcccgaag

SEQ ID NO: 426 - DNA, 454 bp, Homo sapiens
actggtctatctctatcctgacattcccaaggaggaggcattcggaaagtattgtcggccagagagccaggagcatcctgaagctgacccaggcgctgccccatacctgaagaccaagtttatctgtgtgacaccaacgacctgcagcaataccattgacctgccgatgtccccccgcactttagattcattgatgcagtttggaaataatggtgaaggtgctgaaccctcagcaggagggcagtttgagtccctcacctttgacatggagttgacctcggagtgcgctacctcccccatgtgaggagctgagaacggaagctgcagaaagatacgactgaggcgcctacctgcattctgccacccctcacacagccaaaccccagatcatctgaaactactaactttgtggttccagattttttttaatctcctacttctgctatctttgagc

SEQ ID NO: 427 - DNA, 391 bp, Homo sapiens
tcccctgcaagcatgttttccacaaatcctgcgtggatccctggcttagtgaacattgtacctgtcctatgtgcaaacttaatatattgaaggccctgggaattgtgccgaatttgccatgtactgataacgtagcattcgatatggaaaggctcaccagaacccaagctgttaaccgaagatcagccctcggcgacctcgccggcgacaactcccttggccttgagccacttcgaacttcggggatctcacctcttcctcaggatggggagctcactccgagaacaggagaaatcaacattgcagtaacaaaagaatggtttattattgccagttttggcctcctcagtgccctcacactctgctacatgatcatcagagccacagctag

SEQ ID NO: 428 - DNA, 437 bp, Homo sapiens
gcattgtccctatgtaactatcttaatggctatatatatgtattttataaagccatttatgtatacacatgtaacttggaatttccttcatccctacacattttctacacttacatcaccttattgcataaaacaaagtcacgcgctttctgcttgaacatcaaaatatcaaaaaccaaggtacccaaaagatacaagtcagagacaacatccttgtccatatccaaacccagtgtttcagtgctagcaacttaatttctcatacatttatagagtttggtttgctttgctagttgtgtgaatcattgggctgtttttagagccactgttaagagagaatataaaataatcatgacaattactactgtttccacatttacaaattgtgtacttaaatgaacctcatttcccttttatttctgaatggcttgtctgag

SEQ ID NO: 429 - DNA, 355 bp, Homo sapiens
tcagcaggctctagtcgatgccggggacaaaccagcaacatttgtcggatcgcggcaatggattggatctattgaggtgcagctggtactaaaccaattgatcggtataacgtcaaaaatcctgtttgtcagccaaggttcagaaattgcctctcaaggacgggaactggctaatcatttccaaagtgaaggaactccagttatgatcgggggaggagttttggcccacacaatactaggagttgcatggaatgagattacagggcagataaagtttctgattctagatccacattataccggtgctgaagacctgcaagttattttggaaaagggctggtgcggatggaagggc

SEQ ID NO: 430 - DNA, 416 bp, Homo sapiens
ctcctgattcccagtatctggccacaggaactcatgtcgggaaagtgaacatttttggtgtggaaagtgggaaaaaggaatattctttggacacgagaggaaaattcattcttagtattgcatatagtcctgatgggaaatacctagccagtggagccatagatggaatcatcaatatttttgatattgcaactggaaaacttctgcataccctggaaggccatgccatgcccattcgctccttgaccttttccccggactcccagctccttgtcactgcttcagatgatggctacatcaagatctatgatgtacaacatgccaatttggctggcacgctgagcggccatgcctcctgggtgctgaacgttgcattctgtcctgatgacactcactttgtttccagttcgtctgac

SEQ ID NO: 431 - DNA, 513 bp, Homo sapiens
gactcctctaagcatttactcatttactgtattcctgctctgaagatgtggatacagaattagtcactcttgtcactttatttatttattggtttttttttaaccatctgtgtacattcctttcatagggtagagttctagttctagaagttcttattttgtttttgttgtaatgtttgaatactatttaatatccggttttaatattgctggatttgctacctttggttacttgtgcagtgttaaaagtaatccactttcttgtttaatataccagatacatagcaaaagcagcttggaataattatagctgtttatttggctgtgctcagttactatattaagatcttgtactgtgtaacagtaactcttttttgcttttcagtaatttaatatgttcacttaacaaaatacgaactttgagatgcactaaagttttgtttcagcagtggctcaaaaaatttcagaaattacttttgtaattatttgcaattaattgttcttttatcttac

SEQ ID NO: 432 - DNA, 460 bp, Homo sapiens
aaacctacaagcaaattcattccaagaagtgaatatagtagtaaaacataaagactattgcaataaaaagtttccaggccagtgacttgtttaattacattcacatttttacattcactttgcctttcaaagcaggagtattttataaaactgaaataaaactttaaattgtcaagctggtgcttaaagttatgtaaaatctgatttaagtttatttcatttccaaggaaaggaccctgaaaggaggggacagggagcttcctaggtctgttgataaactaactgatgctttgtcaagtcttccaagttttcactgtaaataatacaactaacaatgtaattttgctgttttctaatagagaatgaatgaatatattaatgtattacatttgtttcatgataaaacagttttcactgatactgtgaaatcctttctctcctttctagccttgcaaaatac

SEQ ID NO: 433 - DNA, 547 bp, Homo sapiens
tgaacagtgcgacccagaaacagaccgagtcctacctaagaccactttttagaaagctacggaaaaggaatcttcctgctgatattaaagaatcaataacggatattattaaattcatgttgcagagagaatacgtgaaggcaaatgatgcttatcttcagatggccattggaaatgcgccttggcccatcggtgtcactatggttggtatccatgccagaactggcagagaaaagattttttccaagcatgttgcacatgttttaaatgacgaaactcagcggaaatatattcagggattgaagaggttaatgaccatttgccagaaacactttcctacagacccatccaaatgtgtggagtacaatgcactgtgagatctgtgtatggtgtgttaataacaataagaaacttagggaagcaggctgtggacttctggaattaccaacaggaatgaggaaagaagaaaactggagtttccagtctctgagttctacctgatgtaactcttgattggttttaagaactttgttggccttcatttcaa

SEQ ID NO: 434 - DNA, 384 bp, Homo sapiens
ctcttgaaaggcactgtcatttaaacataaacctggagtactcgaaatagaattcaggtttacaagatgaaagcgtgtggagaagtgtcagatggcagtggaagcatgtgtgtttctaaaaagtaaaaatctcaagaaaacagaaatggcatgctttacccatcttacttagtgaaagagagctgcagttgaaattgtttaaaaagtagcaggtacaatgaatattgtcacagatgtgttaatttttgaagcaatgtgggtgctgactactagtagtatcaaaaatatgttcaggattgttttgatacctgtatttataataaaaaatgttggggggagttgatgaattcctgttaaaagctgttcttgtgtgttacatgtaac

SEQ ID NO: 435 - DNA, 266 bp, Homo sapiens
  misc_feature (61)..(61): n is a, c, g, or t
tatatagggccccaatccattgccatcaaattgcccttggacttttccaaggtatattatnggggttttatgcaaaattccaagctaccatgtaactttttttaaccatttaacaaggagggggaactgtttcctaccttctttacatgttgtgcattgttgtggtccagaaatgccaaacctttttaaagatggtgcaactttgagtccttggcttgactatacaggccttgaacttcatggcatatcaactttgccatatctgc

SEQ ID NO: 436 - DNA, 424 bp, Homo sapiens
ggatctactccaagtgaccaacagcaaaacaaattacgaagttcatagacgagatttgttcaacactgcaattgtttgttagatgtaaaccctgtgactatagtacgttgcttcttgttcttcacaattcatgacttaagtaccaaaatgcataccagttattatatattgccaagaattaaatgataaacttagagactgattagactgaaaatgcctaatcgatatatatattcttgtgcctagtactttaccacaaatacagtgtaatatcatcagtccaaaactgcattacttttgtaaaaacactggttaatttgtataagatattatagagctttttatgctttagaagttaaacaatatctttgggggggaactaatttattttcatcacttgaaatgtggtagctcttacaaagtt

SEQ ID NO: 437 - DNA, 412 bp, Homo sapiens
aatggagactacagcgtcagccagctcagccttggcttttaactcaatattccagtccataggggtggttaaaagttgctgcaaggctgcaggcactggcagtgggaagaggcagacgactagatgacttctgcacttttagctggttgaaaagtaccactcccactctgaacatctggccgtccctgcaaagagtgtactgtgcttgaagcagagcactcacacataaatggctgtgtgtggaattgcttgccaaagaagtttctagcctttccctttcccctaactgcatcagggaagaattcttatctctagcttggtttccacatgaggtttttctgagaagggcttgggacaagaagtctgtcatgttagttaagcaggcaagaaatcctactaatccagttttgtt

SEQ ID NO: 438 - DNA, 397 bp, Homo sapiens
gaattacttgatgtttgccttgaaagaatcaacttctaacctcaaccatccaggaaattgacagtggctgcagtattgactccagtgacataaagttaaccacagtggccttttaacaaatgttgccttttataatgttatctttatgagtttcttgatatgtaagatgaaaaagcatttagaataatcttttaatttgtgtatatttgggatgatatttaggagctatcaatcaaattttacatctcacaatgtactgtttacatggatattggctgctttttttaaggaaaaccacattgagatgtgacaagtgttaggacttgtcacagatttctaactctgccgcataaactataaatctgtaaggtggtacacagcgtgtcttgttagcaaa

SEQ ID NO: 439 - DNA, 405 bp, Homo sapiens
gtggtagttccaatgccaaggagcctaagacgcgcgcaggcggtttcgcgagcgcgttggagcggcactcggagcttctacagaaggtggagcccctacagaagggttctccaaaaaatgtggaatcctttgcatctatgctgagacattctcctcttacacagatgggacctgcaaaggataaactggtcattggacggatctttcatattgtggagaatgatctgtacatagattttggtggaaagtttcattgtgtatgtagaagaccagaagtggatggagagaaataccagaaaggaaccagggtccggttgcggctattagatcttgaacttacgtctaggttcctgggagcaacaacagatacaactgtactagaggctaatgcagttctcttgggaa

SEQ ID NO: 440 - DNA, 460 bp, Homo sapiens
  misc_feature (62)..(62): n is a, c, g, or t
  misc_feature (182)..(182): n is a, c, g, or t
taaagatcttgctgtggctctgttatgttctgaggccttgggattagcctcttcctcattanggagctgattttctagtctgtggatcagctatgcctttggacacttctcttttccattgtgccttttgaatgttgtcttctcactcagcatcagcacttcgatctaaatgcagactaggnagttgggaggaggaaccaaagtgaaccatccttcatttattcagtcattcgttcatctgtcaaacacgtatttggacatcaaggttgcagagatgaacaatgcatggatttcatctttgaggagttcaaaacctagtggagagaacacatggtacaatcgtaacacatgaaggacaagtaagtgctgcagtaaaggtactaataacatgttccttggaacagaggaagaaaaaccacgaaaccatggaaattagggaagcctttacagagggtgtgac

SEQ ID NO: 441 - DNA, 405 bp, Homo sapiens
aagcatgacattcgttcacaatagcactattttaaataaattataagctttaaggtacgaagtatttaatagatctaatcaaatatgttgattcatggctataataaagcaggagcaattataaaatcttcaatcaattgaacttttacaaaaccacttgagaatttcatgagcactttaaaatctgaactttcaaagcttgctattaaatcatttagaatgtttacatttactaaggtgtgctgggtcatgtaaaatattagacactaatattttcatagaaattaggctggagaaagaaggaagaaatggttttcttaaatacctacaaaaaagttactgtggtatctatgagttatcatcttagctgtgttaaaaatgaatttttactatggcagatatggt

SEQ ID NO: 442 - DNA, 473 bp, Homo sapiens
  misc_feature (103)..(103): n is a, c, g, or t
actgtttatctgcttcatatgctttttttaatttcactattccatttctaaattaaagttatgctaaattgagtaagctgtttatcacttaacagctcatttngtctttttcaatatacaaattttaaaaatactacaatatttaactaaggcccaaccgatttccataatgtagcagttaccgtgttcacctcacactaaggcctagagtttgctctgatatgcatttggatgattaatgttatgctgttctttcatgtgaatgtcaagacatggagggtgtttgtaattttatggtaaaattaatccttcttacacataatggtgtcttaaaattgacaaaaaatgagcacttacaattgtatgtctcctcaaatgaaaattctttatctgaaattttaaaagacattgattccgcatgtaaggatttttcatctgaagtacaataatgcacaatcagtgttgctcaaact

SEQ ID NO: 443 - DNA, 527 bp, Homo sapiens
gaggagcttatatttggaaccgaccatattacaacaggtgcttccagtgattttgataatgccactaaaatagcaaagcggatggttaccaaatttggaatgagtgaaaagcttggagttatgacctacagtgatacagggaaactaagtccagaaacccaatctgccatcgaacaagaaataagaatccttctaagggactcatatgaacgagcaaaacatatcttgaaaactcatgcaaaggagcataagaatctcgcagaagctttattgacctatgagactttgatgccaaagagattcaaattgttcttgaggggaaaaagttggaagtgagatgataactctcttgatatggatgcttgctggttttattgcaagaatataagtagcattgcagtagtctacttttacaacgctttcccctcattcttgatgtggtgtaattgaagggtgtgaaatgctttgtcaatcatttgtcacatttatccagtttgggttattctcattatgacacctattgcaaa

SEQ ID NO: 444 - DNA, 328 bp, Homo sapiens
cgcctcgtacgcaacgtggagtactaccagagcaactatgtgttcgtgttcctgggcctcatcctgtactgtgtggtgacgtcccctatgttgctggtggctctggctgtctttttcggcgcctgttacattctctatctgcgcaccttggagtccaagcttgtgctctttggccgagaggtgagcccagagcatcagtatgctctggctggaggcatctccttccccttcttctggctggctggtgcgggctcggccgtcttctgggtgctgggagccaccctggtggtcatcggctcccacgctgccttccaccagattgaggctg

SEQ ID NO: 445 - DNA, 231 bp, Homo sapiens
aaatggctattcctacaaagtggcagtcgcattgtctctttttcttggatggttgggagcagatcgattttaccttggataccctgctttgggtttgttaaagttttgcactgtagggttttgtggaattgggagcctaattgatttcattcttatttcaatgcagattgttggaccttcagatggaagtagttacattatagattactatggaaccagacttacaagact

SEQ ID NO: 446 - DNA, 158 bp, Homo sapiens
gtgtgtgggtcttttgatggtttctattctgactgacatcaatttgtctaatcttgtagcagtacagtacagtcctgattactgcaactttaggaaaaggtctgataaaaaccaagatgcctccacattttgtcataattgtaaccaatttcacctct

SEQ ID NO: 447 - DNA, 341 bp, Homo sapiens
  misc_feature (150)..(150): n is a, c, g, or t
  misc_feature (269)..(270): n is a, c, g, or t
ccctgctgaccaggttgagctgagcatgggcatgtccgcggatttccagcatgcggttgaagtaggatctacaaatgtccgaataggaagcacgatttttggagagcgggattactcaaagaaacccaccccggacaagtgcgcagcagnacgtgaaggccccgctggaggtggcacaggagcactgagccagggaatactgagagcactaactatgcactaacctagattttcattcccaccccccacccaacaccactaaagtcctnnccttcttttgtgttctgtggagagcactaatgatcacgtgtgttgatggaaaccatctgtgcttagtctct

SEQ ID NO: 448 - DNA, 522 bp, Homo sapiens
atttctgttataaattgccagcattttaatgaaaatctaatgatgtaataggcattttctttatttgaacctacctcttttattttctgaaccaaagagaaagatggactggtgtttgtgaaacatttttaaaaatgtagtttcatttatattagttatgtttgataaatgtctcagtatttttataatatgataagcctgggattctacttttagggttatttgtacttttgagtaatatataaagtgacaatattaaggtacatgatcagctctttctatttttactcgtaaaaattatggaaatgaataattttgctaacaactttgaaatttcaaacttctggaaaatatgaaaatattcattgttcattatgaatttaaattgtaaggtatgaatgtgatttgtctgtacatcttgtatcttttccaaaaaatgattctgtatcttttggaaaaaagccgagagttgaagatagtatatttctggtagtactgaatatttacttacagtttctatca

SEQ ID NO: 449 - DNA, 475 bp, Homo sapiens
accacgcttggctaagaacacctaaatttttatgtttcttggctcaaaaaccagttccatttctaatgttgtcctcacaagaaggctaattggtggtgagacagcaggggaggaggaagagctgtggtttgtaacttgttcaactcaggcaataagcgattttagctttatttaaagtcttctgtccagctttaagcactttgtaagacatggctgaaagtagcttttctatcagaattgcagatagtcatgttgggctaacagtcaattggatatattcctttacctcacatgaccccagcaactgtggtggtatctagaggtgaaacaggcaagtgaaatggacacctctgctgtgaatgttttagagaaggaaattcaaaaaatgttgtaactgaaagcactgttgaatatgggtatcggctttctttttcactttgactcttaacattatcagtcaacttccacattaatg

SEQ ID NO: 450 - DNA, 426 bp, Homo sapiens
tgcacttactgctggcttattcatgtatgttgctctggttgatatggtacctgaaatgctgcacaatgatgctagtgaccatggatgtagccgctgggggtatttctttttacagaatgctgggatgcttttgggttttggaattatgttacttatttccatatttgaacataaaatcgtgtttcgtataaatttctagttaaggtttaaatgctagagtagcttaaaaagttgtcatagtttcagtaggtcatagggagatgagtttgtatgctgtactatgcagcgtttaaagttagtgggttttgtgatttttgtattgaatattgctgtctgttacaaagtcagttaaaggtacgttttaatatttaagttattctatcttggagataaaatctgtatgtgcaattcaccggtattaccagt

SEQ ID NO: 451 - DNA, 468 bp, Homo sapiens
  misc_feature (109)..(112): n is a, c, g, or t
  misc_feature (166)..(166): n is a, c, g, or t
  misc_feature (228)..(228): n is a, c, g, or t
aggagttacctatcactttcacttataattccaaaagatgactacaaccatgtccatgctcagattcaaacagttttccatatcacttttgggtggtaagatgatttannnncagttttttttttaattggcagcaccactaaccattccttacattcttttttgntatgtgtggttttctttttatttaacccgcagccgacatcgtagtttcttgttttgttttgnttttacagagctgttgcatgacttatgttaccatcctaaaaaacactatattaaacatggaataaattgtctttttatgaattaggctttttgaacatcctgtgttgggatttttttgtttttcaattggcaacaaaagctctgtagggctgcagacatttaaagttcacataatcatctgtaagacattatgtattttgtggaaatactagaatttttttcctgattttgccattatat

SEQ ID NO: 452 - DNA, 371 bp, Homo sapiens
attcctctgcctaccaagattttagtgaagcctgacaggacatttgaaattaagattggacagcccactgtttcctacttcctgaaggcagcagctgggattgaaaagggggcccggcaaacagggaaagaggtggcaggcctggtgaccttgaagcatgtgtatgagattgcccgcatcaaagctcaggatgaggcatttgccctgcaggatgtacccctgtcgtctgttgtccgctccatcatcgggtctgcccgttctctgggcattcgcgtggtgaaggacctcagttcagaagagcttgcagctttccagaaggaacgagccatcttcctggctgctcagaaggaggcagatttggctgcccaaga

SEQ ID NO: 453 - DNA, 501 bp, Homo sapiens
gcagcttggagtgctaactggaagatcaaaatcatgtctcttgctgataacctaagagcattaagctctgagtccagtgaggtcatagcagtgtatgctccttgcccttacggagtgtctgtttttagaaatttagattttaaaaggcgtgggacatacgaccaggccctatagccacataaatataaatttcatagaaaaagaataaaagcggagatatattttttgacacagaggcacccaaagaaatacaaacattgcctagctgctgccatttctgtaactgcccagaagggtgacagatttctgaaggggaaaggattcagatatgaccttttctttagtcccaaccactagttttaacaaatgtgaattattgaaatgtgaagggacaaaaagaatcatacatttaaactgtcttgttcagcataccaatattgtatgttacaaatcatcatttctaaatctggattgattctgttgtgtttttgactgtttcta

SEQ ID NO: 454 - DNA, 452 bp, Homo sapiens
gaagccctgccaacgtgggataagcagatccaatcactttgtttccaagtgaataaccttttggagaaaattagtcaaacagcaccagaatggacagcacaagccatggaagcccagatggctcagtgaatccttgcagaacttctgtgcacatgacatctttttccatgttgtgcagatcagtttcactatctccaaagcatttgcatcatgaccttatacatttcaatcccttttatgctggattccgtttaaagaagacattattagagcaggaagtacaagcatttaaaatatgtagttcccatatatttcagggtctctgtgtattaagctaactcagatgttttgaaagctttttctttaaacagaggtgaaatatctgtggctaaaaagtttgagatttgtgataactttgtagtcatgtaaaacttaagtgcttcatgcctctc

SEQ ID NO: 455 - DNA, 335 bp, Homo sapiens
actgtccttttgggcttctataaatgaatatacatctaaaatgtgggggtttagcttaattgattgttttccatagaaactaggttttatgggaagatggttggatagacttgtttcacttaaaggtctgatttgtgtaggacaaacccacatatgtaatcgtgccagtctgttctctgcatgacataattttccagcaatagctgtgtggtttttgtaatcctatcatctagtcagttcaagatcttgcaacactgtgtgattctttgctccgtagttcagtcttgttgaacatgacacaggtgtttactttcctgttcttgcatctagtttca

SEQ ID NO: 456 - DNA, 168 bp, Homo sapiens
taattgagtcagatgctaacgagatactgcaggcataactgctgtttttctgacaactgattgtgaaaccttaaaacctgcatacctcttcttacagtgaggagtatgcaaaatctggaaagatattctattttttttatataggtagataggatcgccatttatttc

SEQ ID NO: 457 - DNA, 411 bp, Homo sapiens
tgtggtacggctgcacaacttccaccagctctctgcaccccagccctgtttcaccttcagccatcccaacagagatcctatgattgacaacaaccgctattgcaccttggaatttcctgtggaggtgaacacagtactacatggctttgcggtctactttgagactgtgctttatcaggacatcactctgagtatccgtccagagactcactctcctgggatgttctcatggtttcccatcctcttccctattaagcagcccataacggtacgtgaaggccaaaccatctgtgtgcgtttctggcgatgcagcaattccaagaaggtgtggtatgagtgggctgtgacagcaccagtctgttctgctattcataaccccacaggccgctcatataccattggcctctagcc

SEQ ID NO: 458 - DNA, 452 bp, Homo sapiens
cttatgtttgtttagcgactttagcaaaatgttttcatataatctcatctgtttacctagaagataggttaaggaaatatattattattcctgtttgatgtgggtgaaggcagagatctaacctggcttgtttagggccataccactaattagaaaatctgtgctagaacctgtgtcttattcctataagctatgtgttcagactgaaactggagaaattatgactattttatttatagtagtagttaaatctgaatgtgtatggactaaaaatatttaattgctgagtaaactgcttaacttcaaagatagttattgaccttataaataaatatttcaaaattttgattcggaagactaagtctggagctagacattataatgctatcaaagaagttgatctctgttttgactaaactagaggaaaaatgattggatgagtttattctttt

SEQ ID NO: 459 - DNA, 521 bp, Homo sapiens
tgaattcactcaggtttctctttgagggtcagagaattgctgataatcatactccaaaagaactgggaatggaggaagaagatgtgattgaagtttatcaggaacaaacggggggtcattcaacagtttagatattctttttattttttttcttttccctcaatccttttttatttttaaaaatagttcttttgtaatgtggtgttcaaaacggaattgaaaactggcaccccatctctttgaaacatctggtaatttgaattctagtgctcattattcattattgtttgttttcattgtgctgatttttggtgatcaagcctcagtccccttcatattaccctctcctttttaaaaattacgtgtgcacagagaggtcacctttttcaggacattgcattttcaggcttgtggtgataaataagatcgaccaatgcaagtgttcataatgactttccaattggccctgatgttctagcatgtgattacttcactccctggactgtgactttcagtgggag

SEQ ID NO: 460 - DNA, 505 bp, Homo sapiens
agagccaagattcctgttttcagtttgtggattcatcctgctggttttactttagtccctccatgtcaaagtgggcctgagaaaagctcatacatgcctcatgtgaagtgtccaccctctctgaaaatctttcttgttcaaaacagcaacgacatatcttgttaacttttacggtgacttttggaggaggggagtttggaaattgtaaaatgttatagattgttgcctatttcctgctgaaagtaaatgtttttaaaaagtatcatataaagctgaatacaaattggtttggggggagatcctttcctacccaaagtcataaatatattctttactgccttgtggaaattttatagttttgcctttcacatttgtctttagtctgtcctgaactgatttttgtgaaaattatgagttagaaattcaacttaacatttttcatattcgaagtggttgtctctgcactatttactgaaaagttcatcctttccccagtgatttgtaa

SEQ ID NO: 461 - DNA, 521 bp, Homo sapiens
tttcccccaagcatattttcttgtatttctgtttccatatatatatatatatataatttccaattcaggatattgccctgccatccatgaaaactgttctggcaccaaaagtaatgacaaatgttaagtgtaataatagaaaagtagagcaaagagccattcagcttcagtctttacataccatgaataaaacattaaaacatcatatggagaagtttacatggtgattgttcacctgcagtactgtggagttttaacattttgtcctcttttcagtgaaacagagtaaaaatattcatctaccattactgttatttgctgattttgttttattttttgatggtaatattctatccttatgacactattgcaaccaaattggctttaccatcttggctttagtaggtatagaagacaatggattaccatctttattgctgtaatgtgttaagcattatatgctagtagaatctagtttaattgtttcaggtggaaagtattctttgagtttccatattgaa

SEQ ID NO: 462 - DNA, 375 bp, Homo sapiens
tactgggaaacctgctacttcgtcagctaaccagaaacctgtgggtttgactggtctggcaacatcatccaaaggtggaataggttccaaaataggttccaataacagcactacgcccactgtacctttaaaaccacctccacctctaaccttgggtaaaactggccttagtcgctcagttagttgtgacaatgtcagcaaagtaggtcttcctagtccaagtagtttagttccaggaagcagcagccaactaagtgggaatggaaatagtggaacatcaggacctagtggaagtactaccagcaaaactacttcagaatccagcagctctccctcagcatcccttaaaggcccaacttcacaagatcacagctc

SEQ ID NO: 463 - DNA, 500 bp, Homo sapiens
aagcatcttgaaacaccatggctgtagctgcagtaaaatgggtgatgtcaaagagaactatcttgaaacatttatttccagtccaaaatggagctttatattgtgtttgtcataaatctacgtattctcctctaccagatgactataattgcaacgtagagcttgctctgacttctgatggcaggacaatagtatgctaccacccttctgtggacattccatatgaacacacaaaacctatccctcggccagatcctgtgcataataatgaagaaacacatgatcaagtgctgaaaaccagattggaagaaaaagttgaacaccttgaggaaggacctatgatagaacaacttagcaaaatgttctttactactaagcaccgttggtatcctcatggacggtatcacagatgtcgtaaggaatcttgaatcctccaaaagacagatgatgcggaggttcctgggggaatcaaagagaaatgtgcctcatttgccatttga

SEQ ID NO: 464 - DNA, 441 bp, Homo sapiens
gatctgccataaattcttcctaaataatttgtttactaactctttaggccactgtgctttgcggtccattagtaaacttgtgttgctaagtgctaaacagaatactgctattttgagagagtcaagactctttcttaagggccaagaaagcaacttgagccttgggctaatctggctgagtagtcagttataaaagcataattgctttatattttggatcattttttactgggggcggacttggggggggttgcatacaaagataacatatatatccaactttctgaaatgaaatgtttttagattactttttcaactgtaaataatgtacatttaatgtcacaagaaaaaaatgtcttctgcaaattttctagtataacagaaatttttgtagatgaaaaaaatcattatgtttagaggtctaatgctatgttttcatat

SEQ ID NO: 465 - DNA, 402 bp, Homo sapiens
agccctccaggttaaagttgattcagctttaagatgttacccttccagaggtacagaagaaacctatttccaaaaaaggtcctttcagtggtagactcggggagaacttggtggcccctttgagatgccaggtttcttttttatctagaaatggctgcaagtggaagcggataatatgtaggcactttgtaaattcatattgagtaaatgaatgaaattgtgatttcctgagaatcgaaccttggttccctaaccctaattgatgagaggctcgctgcttgatggtgtgtacaaactcacctgaatgggacttttttagacagatcttcatgacctgttcccaccccagttcatcatcatctcttttacaccaaaaggtctgcagggtgtggtaactgtttc

SEQ ID NO: 466 - DNA, 534 bp, Homo sapiens
tggagaactgcttttacctgtggccatgtcagagaaagattttaagaaagagcaaggagtgctaacaggaatgaatgaaacttctgctgtaatcattgctgcaccacagaatttcactccctctgtgatctttcagaaggttgtaaatgtagccaatgtaggtgcagtcccttctggccaggataatatacacaggtttgcagctaaaactgtgcacagtgggtcattgatgctagtcacagtggaactgaaggaaggctctacagcccagcttatcataaacactgagaaaactgtgattggctctgttctgctgcgggaactgaagcctgtcctgtctcaggggtaacctgcttacatctggactttagaatctggcacacaacaaaagtgcctggcatccactactgctgcctttcatttataataatagcccttccatctggcagtgggggaagaatacactcttgacattcttgtctcctgctttagaatgctagtgtgtatctatcatgtatgcaatactttccccct

SEQ ID NO: 467 - DNA, 511 bp, Homo sapiens
catgtttggcttcctatttctggtgtttatcattttggttattacctgttctgaagcaactatacttctttgctatttccacctatgtgcagaggattatcattggcaatggcgttcattccttacgagtggctttactgcagtttatttcttaatctatgcagtacactacttcttttcaaaactgcagatcacgggaacagcaagcacaattctgtactttggttataccatgataatggttttgatcttctttctttttacaggaacaattggcttctttgcatgcttttggtttgttaccaaaatatacagtgtggtgaaggttgactgaagaagtccagtgtgtccagttaaaacagaaataaattaaactcttcatcaacaaagacctgtttttgtgactgccttgagttttatcagaattattggcctagtaatccttcagaaacaccgtaattctaaataaacctcttcccatacacctttcccccataagatctgtcttcaa

SEQ ID NO: 468 - DNA, 569 bp, Homo sapiens
gactgtgggtcttaaaaggttctggaaagcagtaagttcatttttctaaaaactataacattctgttggagtattttcttccttacgtcaatacttttcctgcattatttgaaattgtgggctggggagaaacagtagtcaaagctttctgaattgagatactttgaaattccaagtgtagatttttagaatgtcattttataaatggccgtttttggaattacttgataagaacttttgaaaatggaaggattagtatggcctatttttaaagctgctttgttaggttccttatgttttattaactgtcttttctcagtttccatttcatttttttttttctagttttggtgacttagtgattttgtcattttttacatcaacttcatggtcttgtttttacatggtaattgcatgtacttaggatctatctaataggggctttaaataaatttggtcatatttatgtgtaagcacattttactgtaaatgtttgggtttctgaatttaaacagatctgtttatttcagtatgtagtaaacaatatcttaaagtgtccgattcactac

SEQ ID NO: 469 - DNA, 167 bp, Homo sapiens
ggtggtggccccagtcaaaactggaaccagggatatagtaactattggaatcaaggctatggcaactatggatataacagccaaggttacggtggttatggaggatatgactacactggttacaacaactactatggatatggtgattatagcaaccagcagagtgg

SEQ ID NO: 470 - DNA, 539 bp, Homo sapiens
tacctgtcatccatataagcaaactttttggcttacaactatttttttaatattagccttctagtctgtaatggaaattgtatattttgatagaagttttttctccattggttaaattagcattacttaaaatttgtttctttagaaaataaatgcaggttataaatgtgtgtatatttagagattataaggctctctgagccatcttctgatttttcattgctctataattctttttactgaaaatactatgttatgaatggtattaaattttagtctctggaacatccaaaaccaagcaaagggatgtgactattttgaatgaatcagaatgtcaacttgtgtgtacactatatctacacttactcattatttaaaaagaataatgaaaaatctagatcaattcttcaatttgattgaactgttcagccttttcaagatttctttatttacaaatgattacatttaaatgaatgtacattcttctcactgactttggtgattttgaaacctagaatgatgtgtttctatctgtaata

SEQ ID NO: 471 - DNA, 337 bp, Homo sapiens
aagtaaatacttgatggctctgaagaatctgtgtgacttgggcattgtagatccatatccaccattatgtgacattaaaggatcatatacagcgcaatttgaacataccatcctgttgcgtccaacatgtaaagaagttgtcagcagaggagatgactattaaacttagtccaaagccacctcaacacctttattttctgagctttgttggaaaacatgataccagaattaatttgccacatgttgtctgttttaacagtggacccatgtaatacttttatccatgtttaaaaagaaggaatttggacaaaggcaaaccgtctaatgtaattaacca

SEQ ID NO: 472 - DNA, 375 bp, Homo sapiens
tgccacccgggagtctatggtcaaactctcaagtaagctgagtgccgtgagcttgcggggaattggcagtcccagcacagatgccagtgccagtgatgtccacggcaatttcgccttcgagggcattggagatgaggatctgtaatctccactgcttggatgtctgccctctaccccagaggaatttacagaaacttgccctgtgcctgtgtcccccatgctaggggcggaggggtcttttccttcttctttcctacctaccccttttctcttggccaggggcctcgtatcctacctttccttgtcccctgggctggctgcacagaggattgccccttctcttttcagagctggccctcgatgccaaattagcat

SEQ ID NO: 473 - DNA, 312 bp, Homo sapiens
accctcttccacacatgtatgtgataaaggatcttgttcccgatttgagcaacttctatgcacagtacaaatccattgagccttatttgaagaagaaggatgaatctcaggaaggcaagcagcagtatctgcagtccatagaagagcgtgagaaactggacgggctctacgagtgcattctctgtgcctgctgtagcaccagctgccccagctactggtggaacggagacaaatatctggggcctgcagttcttatgcaggcctatcgctggatgattgactccagagatgacttcacagaggagcgcctgg

SEQ ID NO: 474 - DNA, 233 bp, Homo sapiens
tcaggctttacttaggagaatggactaagctgaaggtgtacttcaccagcaagagtcaactctagaattcaggatgttccttctattgttttcttagccatctgtcaggaaatgtaactttggttttatttttggcttattccaaggggtaagccagaaaatagaaatgattatttctgattaatagcagaaactttttcaatctcaaatatataaggtgtctgctcttttaa

SEQ ID NO: 475 - DNA, 321 bp, Homo sapiens
gtttggatggtggaaggtctcattttattgagatttttaagatacatgcaaaggtttggaaatagaacctctaggcaccctcctcagtgtgggtgggctgagagttaaagacagtgtggctgcagtagcatagaggcgcctagaaattccacttgcaccgtagggcatgctgataccatcccaatagctgttgcccattgacctctagtggtgagtttctagaatactggtccattcatgagatattcaagattcaagagtattctcacttctgggttatcagcataaactggaatgtagtgtcagaggatactgtggctt

SEQ ID NO: 476 - DNA, 420 bp, Homo sapiens
aaccttaggatgagctcccttttctaaggtgtttttgttttttgtatgtttgcttttttcctgttttttgttttttccatttacggcagtggtaccatgttttggatgtgtgatgtttatatgggagaacaaaaagctgatgtatagccctgtatacagtgtagatactatttttgtaaaaacacaaggctaaattaatgaacaagaatactgaatatttcatcattaaaaatttcttgtatttcttgtgcattaatctgacgataatttccctgtatattatgttcatttagctgtttgtaatttttgttaattagatcaggttgtctgcatttgttggtgtaagtgaacatcatcacagttatcctgagttgagtttaagccaaatacatgcatagaaaagggtcttcctattaatgg

SEQ ID NO: 477 - DNA, 327 bp, Homo sapiens
gaaaatattcctgacgtggtcccgggcagccatctgactccaatagagagagagagttcttcacctttaagtagtaaccagtctgaacctggcagcatcgctttaaactcgtatcactccagaaattgttctgagagtgatcactccagaaatggttttgatactgattccagctgtctggaatcacatagctccttatctgactcagaatttcccccaaataataaaggtgaaataaaaacagaaggacaagagctcataaccgtaataaaagcccccacctcctttggttatgataaaccacatgtgctagtggatctacttgtg

SEQ ID NO: 478 - DNA, 467 bp, Homo sapiens
cactggttgcacagggacctgcgtgtgcggtttgtggacaacatgtacaaaggaggccaatattacaacaccaagatgataattgaagatgtcctaagcccagatacctgtgtatgtcggacagatgaaggccgagtcctggaaggcctgagggaagacatgctggagaccctggttcccaaggcagagggtgaccgtgtgatggtggtgctgggcccacagactggaagggtgggacatttgctgagccgggacagagcacggtgacccgggatttggtgcaactgccaagagaaaatcaggtggtggtgacttcactacgatgccatctgccagtacatgggccctagtgacacagatgatgactgacccatgggactcctcccatcccccaggctggtaccagttctgtaccatatgagaaagttgccttcagaaggtgggaagatcattgttccatcctctac

SEQ ID NO: 479 - DNA, 504 bp, Homo sapiens
aggaaacattcatgaacagagttgaagttaaagtaaagattcctgaagagctaaaaccatggcttgttgatgactgggacttaattaccaggcaaaaacagctcttctatcttcctgccgagaagaatgtggattccattcttgaggactatgcaaattacaagaaatctcatggaaacacagataataaggagtatgcagttaatgaagttgtggcagggataaaagaatacttcaacctaatgttgggcacccagctactcaacaaatttgagagaccacagtatgccgaaattcttgcagattgtcccgatgcacccatgtcccaggtgtatggagtgccacatctcctgagattatctgtacaaattggagcaatgttggcctatacacctctgaatgagaagagccttgctttattactcaattatcttcacgatttcctaaagtacctggcaaagaattctgcaactttgtttagtgccagcgattatgaagtggctc

SEQ ID NO: 480 - DNA, 552 bp, Homo sapiens
gaccatctgcttttattaaatttgttgacaaaattttctcattttcttttcacttcgggctgtgtaaacacagtcaaaataattctaaatccctcgatatttttaaagatctgtaagtaacttcacattaaaaaatgaaatattttttaatttaaagcttactctgtccatttatccacaggaaagtgttatttttaaaggaaggttcatgtagagaaaagcacacttgtaggataagtgaaatggatactacatctttaaacagtatttcattgcctgtgtatggaaaaaccatttgaagtgtacctgtgtacataactctgtaaaaacactgaaaaattatactaacttatttatgttaaaagattttttttaatctagacaatatacaagccaaagtggcatgttttgtgcatttgtaaatgctgtgttgggtagaataggttttcccctcttttgttaaataatatggctatgcttaaaaggttgcatactgagccaagtataattttttgtaatgtgtgaaaaagatgccaattattgttacacatt

SEQ ID NO: 481 - DNA, 424 bp, Homo sapiens
gaatctgcggaactgtgcatgatgagaaaaaaccagatgtgctgctttatgacaccatcttccagatattcaacaaccgcaactgcctcagtctgaaggacaaacccaaggtcatcattgtccaggcctgcagaggtgcaaaccgtggggaactgtgggtcagagactctccagcatccttggaagtggcctcttcacagtcatctgagaacctggaggaagatgctgtttacaagacccacgtggagaaggacttcattgctttctgctcttcaacgccacacaacgtgtcctggagagacagcacaatgggctctatcttcatcacacaactcatcacatgcttccagaaatattcttggtgctgccacctagaggaagtatttcggaaggtacagcaatcatttgaaactccaagggccaa

SEQ ID NO: 482 - DNA, 425 bp, Homo sapiens
tggctgcatcattggggcttgttgcaacctaaatacatttgaagtcatccctgagaatacggtgatctatggtgcagactgccttcgtcgggtgcagactgagcgaccgcagccccagacactacagctggatttcttgatgaaaatcttgccaaattaccaccacctaaagaagactatgaaaggaagctcaactccagtaaagaactaagaacagtgtataacatgaagataacattttgtctttgaccactgtcttttgaatgggcccacagtgtttatgtactcttaacaactcacagaataatacatgttcactttattttgtaaaattgggttgagaggaaactaatggagtttcattgtaactgtcctttgtaatttatataaatgtattattttcctatatccttggttcttttctg

SEQ ID NO: 483 - DNA, 387 bp, Homo sapiens
gttggagaagtcttgcagttatcttagcattgtataaacagccttaagtagagcctaagaagagaattcctttccctcctttagtccttctccattttttattttcagttatatgtgctgaaataattactggtaaaattcagggttgtggattatcttccacacatgaattttctctctcctggcacgaatataaagcacatctcttaactgcatggtgccagtgctaatgcttcatcctgttgctggcagtgggatgtggacttagaaaatcaagttctagcattttagtaggttaacactgaagttgtggttgttaggttcacaccctgttttataaacaacatcaaaatggcagaaccattgctgactttaggttcacatgag

SEQ ID NO: 484 - DNA, 522 bp, Homo sapiens
aactcatctgcagagcacatcaactagtgcacgaaggctataaatttatgtttgatgagaagctggtgacagtatggtctgctcctaattactgctatcgttgtggaaatattgcttcgatcatggtcttcaaagatgtaaatacaagagaaccaaagttattccgggcagttccagattcagaacgtgttattcctcccagaacgacaacgccatatttcctttgaggccttcgcccatcctgctgacccatttttctgccctcttcttaccccaattttcttgtattaccctctacaatatactttttattgagcactttgctgctgaaatgctgcctcttgcctttttttttttttaaatttttaaattatctaaatttattgtttgttgtggtgtctatagcaaagtttttctatcaattttcccccatcccatccccaccctggactcatttgagaagacttgagaaatgtcttaatactcacactgctgcatgtagctcttgcttatttactggtc

SEQ ID NO: 485 - DNA, 527 bp, Homo sapiens
tgagtctcgggatgaagccacagctgctgtcattgacttaaatgacaggcctataggttcaagaaaagtaaaacttgtattagggtagccattcacatcattttttatagggtagatcttcatattgctgtgattaatgcatccagattgttttcctagtatttccaggttagaacctgtggattgtttcaattgcatatagcttggtttccataacatagagcattggttgactgtttacagaagactcactcaccaggataaacattgctgtatgttacagtaaagctatctggagagaacacataaatgattttggcataccattagagaaaccatttgtaaaactcaaatgaccacataaagcttatcaaggagtctagattggttttgttttataccatatgggatgaagaaaatagaaatgtcagtagaactcattgagggtgctcttgccagctgctgaaaatagaagttggctactctcagaatttggtttaaagctggacagatttgctttgttatag

SEQ ID NO: 486 - DNA, 487 bp, Homo sapiens
gtgaagcccgtggactacagagagtatggccgaaggctggtcatgagcatcaggagaagtgcattgatgtgagaggagcagtgccaatcgggcagaagtttgcaaataggcagaatggaatcgatttcctcccacctccgtgtgacgatcccatgttagctacacagtgcagaggctcttgatggtggactaagcaattcctccctcgtgcgcatctcagaacccatcggtaggcaaaggaaaatacgctcaggtggttgtggtgtagactgtgtcaggcctacggagtcagccagtggctagcgcaagaccagtcactccctctgccttcaggcttctgtcaatttcattatcatcaagcaggaattatgtcgtaagtcactgaccctaactgcagaccatgaagtaaattatgtaactaggtttttgcttctccagtggtgaccacccccccccatccccgctcacaacttgggttcttctcagc

SEQ ID NO: 487 - DNA, 535 bp, Homo sapiens
  misc_feature (78)..(78): n is a, c, g, or t
  misc_feature (89)..(89): n is a, c, g, or t
  misc_feature (186)..(186): n is a, c, g, or t
  misc_feature (206)..(207): n is a, c, g, or t
  misc_feature (219)..(219): n is a, c, g, or t
  misc_feature (233)..(233): n is a, c, g, or t
  misc_feature (256)..(257): n is a, c, g, or t
  misc_feature (268)..(268): n is a, c, g, or t
  misc_feature (287)..(287): n is a, c, g, or t
  misc_feature (294)..(294): n is a, c, g, or t
  misc_feature (342)..(342): n is a, c, g, or t
  misc_feature (373)..(373): n is a, c, g, or t
  misc_feature (455)..(461): n is a, c, g, or t
aaagaacggcagattactgaggaagacttagagggcaaaacagaggaagaaatagaaatgatgaagttaatgggattntgcctcctttngactccacaaaaggtaagaaggtggatggctctgtaaatgcctatgccataaatgtctctcagaagaggaagtacaggcagtacatgaatcgaaaanggtggattcaacagaccttnnggatttcattgncatgagaattgaangtgttgaaggatgattttttttnncccctcatctntggtcagagagtggatttngtatttngtatttaacttgcattcaaaaaacaggatctcagttctcctttcttgntaaagtaagaaaatcttatttatgatatatngcagttaacttaccttgcctcaacagaagaaaggttaaatattacatttttttcttttaggaaatatcatttgtggcaggcnnnnnnnccattttatttgtccttattcctgtggaagcagtatatgttttcttcctgaatgctcattaggacttcttaaaa

SEQ ID NO: 488 - DNA, 340 bp, Homo sapiens
gaagcttattgctcaatccacacctcaggcagttgatggtcaacctcgatcagggagaagacaaagcaaagctcatgagagcttacatgcaagagcctttgtttgtggagtttgcagactgctgtttaggaattgtggagccatcccagaatgaggagtcttaagatggattattgtgctgcttgctcaagcgtgtgcttgactcctggaacctgcctgctccctctcccagaccagctagtttggggctggggagctcaggcaaaagaggtttccaggatgcagattaggtcatgcaggcctttaccggcattgatgtggctcatgtttcaggcagact

SEQ ID NO: 489 - DNA, 515 bp, Homo sapiens
gaaggaccttcactctaagatgttatatttttcttaaaaagtaactcctagtaggggtaccactgaatctgtacagagccgtaaaaactgaagttctgcctctgatgtattttgtgagtttgtttctttgaattttcattttacagttacttttccttgcatacaaacaagcatataaaatggcaacaaactgcacatgatttcacaaatattaaaaagtcttttaaaaagtattgccaaacattaatgttgatttctagttatttattctgggaatgtatagtatttgaaaacagaaattggtaccttgcacacatcatctgtaagctgtttggttttaaaatactgtagataattaaccaaggtagaatgaccttgtaatgtaactgctcttgggcaatattctctgtacatattagcgacaacagattggattttatgttgacatttgtttggttatagtgcaatatattttgtatgcaagcagtttcaataaagtttgatcttcctctgct

SEQ ID NO: 490 - DNA, 267 bp, Homo sapiens
gttgagaccagacaccttttgctgtctcatggggcagctacaagcatgaacgggaccagggaatggcagcagcatgcagaatcttagcactctttagcacaatattttgtattagggaacttttaattgacatgagatgctaaagtcagacattggaattggaagaactataaagtgtgattcgatcgtcaagacatcacttggatttcttaatcttaacatgcttatggaagatgtgaagttgaggtgctgcattctagaacttca

SEQ ID NO: 491 - DNA, 403 bp, Homo sapiens
agcaacatcagcttgaccagtataaaattacagtggattgctcatctcagtcctcaaagctttttgaaaaccaacaccatcacagcttgttttggactttgttacactgttattttcagcatgaaaatgtgtgtttttttagggtttctgattcttcaaagaggcacagagccaaattggtagaggaaggatgcaaagtataaatttgtgtaatattactttaacatgcccatattttacttggaaatattaaaagaaagggttctgtaaaatggaaaacttagtttgtgaattgattttgaggagtggtttttcttttcttggacacttaattctgttctgatattaatttatcagattgcttttgtgcattggataacaccaccattcacaagttaagatt

SEQ ID NO: 492 - DNA, 563 bp, Homo sapiens
ggcgatagaggcacaacagaagttcaaaataaataagcaacacgctagaagggtttatgaaattcttcgactactggtaactgacatgagtgatgccgaacaatacagaagctacagactggatattaaaagaagactaattagcccatataagaaaaagcagagagatcttgctaagatgagaaaatgtctcagaccagaagaactgacaaaccagatgaaccaaatagaaataagcatgcaacatgaacagctggaagagagttttcaggaactagtggaagattaccggcgtgttattgaacgacttgctcaagagtaaagattatactgctctgtacaggaagcttgcaaattttctgtacaatgtgctgtgaaaaatctgatgactttaattttaaaatcttgtgacattttgcttatactaaaagttatctatctttagttgaatattttcttttggagagattgtatattttaaaatactgtttagagtttatgagcatatattgcatttaaagaaagataaagcttctgaaatactactgcaattgcttcccttc

SEQ ID NO: 493 - DNA, 428 bp, Homo sapiens
gccacagacattgccatccaggcagaggagatcatgaagctcaagaagcagctctataacatctacgccaagcacaccaaacagagcctgcaggtgatcgagtccgccatggagagggaccgctacatgagccccatggaggcccaggagtttggcatcttagacaaggttctggtccaccctccccaggacggtgaggatgagcccacgctggtgcagaaggagcctgtagaagcagcgccggcagcagaacctgtcccagctagcacctgagagctgggcctcctctccagaatcatgtggaggggccagaggcttgccagacccccagctgggccctgctcaccccttgttgctgggcttggaggggcctcttgaggaacttttaatttgcaggggtgcccgctatggacggggcattccagctg

SEQ ID NO: 494 - DNA, 456 bp, Homo sapiens
gtgactattgtatatctttccaagagttgaaatgctggcttcagaatcataccagattgtcagtgaagctgatgcctaggaacttttaaagggatcctttcaaaaggatcacttagcaaacacatgttgacttttaactgatgtatgaatattaatactctaaaaatagaaagaccagtaatatataagtcactttacagtgctacttcacacttaaaagtgcatggtatttttcatggtattttgcatgcagccagttaactctcgtagatagagaagtcaggtgatagatgatattaaaaattagcaaacaaaagtgacttgctcagggtcatgcagctgggtgatgatagaagagtgggctttaactggcaggcctgtatgtttacagactaccatactgtaaatatgagctttatggtgtcattctcagaaacttatacatttccgctctcc

SEQ ID NO: 495 - DNA, 557 bp, Homo sapiens
  misc_feature (101)..(101): n is a, c, g, or t
gactgtacacactataaatggcatcaaatttggatatttttcttaattatgacatgcaaagtaatgtgagtcctgccagtattctggtggataaggtcttntgagtatttggttgcttgtcacaacattctccaagcagtgatatttctaaagaggagatacatgttgaaaacggttttaatttacacttccatttcctgattacatttggaaatactttgtgtaaaccatcccccttccacctccatttgtctgttgaaagattttaagttggaaacagttcctgtctgaaaactcttctgagaaccacaaaccttgtgtatggattcggcatggagccctcagctggcggctctgggtgctgacggccgctggagaggtgggctcccctcgtgcactttattgcctgggcagttttgcttgatcttttgtgactttgagccttttaagtagtttgaatgataagacttaaaatgtttcataattatgttttatgtaacagactttgacattatttaaacgagcatgtgtaatgtaacttttctctttgaatcata

SEQ ID NO: 496 - DNA, 361 bp, Homo sapiens
  misc_feature (101)..(101): n is a, c, g, or t
  misc_feature (172)..(172): n is a, c, g, or t
tttgtctctgtacctttaccaacattaggatctcacctctttcttcctcccttaattcataagcaccactcctatcaaagtcccatctcttaaccctgggntatcaaacaaactgtgagttttccagaatctgtttcccagttttcccctcagctttcctggtctcccatcngaactgcttctttgtgcacctcttgttctttctcttggctcccagtcttgattcctgtgatcactcttgcatcactaattgcacaagtgatttcaggtgcaattctgattagcctgcgtccacacagtgatcgatgatcctatgtgcctagaaaggacactgtgtgctgctcatgacctgcaacaggaa

SEQ ID NO: 497 - DNA, 567 bp, Homo sapiens
cagaacttcgtagaccgacctgaagtttctttttgaatacttgtttctttagcactttgaagatagaaaaaccactttttaagtactaagtcatcatttgccttgaaagtttcctctgcattgggtttgaagtagtttagttatgtctttttctctgtatgtaagtagtataatttgttactttcaaatacccgtactttgaatgtaggtttttttgttgttgttatctataaaaattgagggaaatggttatgcaaaaaaatattttgctttggaccatatttcttaagcataaaaaaaatgctcagttttgcttgcattccttgagaatgtatttatctgaagatcaaaacaaacaatccagatgtataagtactaggcagaagccaattttaaaatttccttgaataatccatgaaaggaataattcaaatacagataaacagagttggcagtatattatagtgataattttgtattttcacaaaaaaaaagttaaactcttcttttctttttattataatgaccagcttttggtatttcattgttaccaagttctatttttag

SEQ ID NO: 498 - DNA, 266 bp, Homo sapiens
attttctccatggcctgaattaagaccattagaaagcaccaggccgtgggagcagtgaccatctgctgactgttcttgtggatcttgtgtccagggacatggggtgacatgcctcgtatgtgttagagggtggaatggatgtgtttggcgctgcatgggatctggtgcccctcttctcctggattcacatccccacccagggcccgcttttactaagtgttctgccctagattggttcaaggaggtcatccaactgactttatcaa

SEQ ID NO: 499 - DNA, 478 bp, Homo sapiens
  misc_feature (52)..(52): n is a, c, g, or t
  misc_feature (67)..(67): n is a, c, g, or t
  misc_feature (390)..(390): n is a, c, g, or t
agccaaggagctgaaatatatctcagtttataaattcaggtatattcttttngtctccatggcaacnataacttttgaaccaaaaaaaattgtttttacatctttatgctgaaaatgtgtttagattaggaatatggtcgggctgaatttgctgttgctccctaaccaaatccacctcttgttttccttgtgagtccatggctaaatcaaagctgcccctgagaagagacttaatccaagcctgattgtactagtggcatcacttagaagtaggctttccctcttcctagtagatctcaatgttttataattccttaaaacagctgaaaattgggacaacatactttacgcaatgaacagtagttaaataggaaataaactagttccatntaagtatacacctagagttttaattacctttataatgtttcttaaaagtgaaacttagatacaattgtgattggatacttagatacta

SEQ ID NO: 500 - DNA, 416 bp, Homo sapiens
aaatggacatagcgtctgtgaagagaaatttgatatttaagcaacatttttgaatgaaagttgtgaccataaggtttaatttcaaagttccttttaaaagaggttaaggaactgtgttaccttttgtcctaagaaaaaggcttgaatttatgtaaatactttgatcgattgctaattttcaaaggcttcttaggtaggttactacagtaaactgtaactcagtccacattttcatttaggagctagactaccataacaatgcttatgctgtttccaagggtaggttatttttcattaaaagaagaatgaatgcattttaagtttaattcttcatagctgaaagcacaaatttaacggcttcactggacagttttccttagaaggtagttttgtgtgactgtgactaaactatttta

SEQ ID NO: 501 - DNA, 527 bp, Homo sapiens
aagacctacaatggaaccaaccctgatgctgctagccgggctattgattatgtacagagacagctgcattgttgtggaattcacaactactcagactgggaaaatacagattggttcaaagaaaccaaaaaccagagtgtccctcttagctgctgcagagagactgccagcaattgtaatggcagcctggcccacccttccgacctctatgctgaggggtgtgaggctctagttgtgaagaagctacaagaaatcatgatgcatgtgatctgggccgcactggcatttgcagctattcagctgctgggcatgctgtgtgcttgcatcgtgttgtgcagaaggagtagagatcctgcttacgagctcctcatcactggcggaacctatgcatagttgacaactcttgcctgagctttttggtcttgttctgatttggaaggtgaattgagcaggtctgctgctgttggcctctggagttcatttagttaaagcacatgtacactggtgttggacagagcagcttggct

SEQ ID NO: 502 - DNA, 506 bp, Homo sapiens
aggagttgagacctacttcacagtagttctgtggacaatcacaatgggaatccaaggagggtctgtcctgttcgggctgctgctcgtcctggctgtcttctgccattcaggtcatagcctgcagtgctacaactgtcctaacccaactgctgactgcaaaacagccgtcaattgttcatctgattttgatgcgtgtctcattaccaaagctgggttacaagtgtataacaagtgttggaagtttgagcattgcaatttcaacgacgtcacaacccgcttgagggaaaatgagctaacgtactactgctgcaagaaggacctgtgtaactttaacgaacagcttgaaaatggtgggacatccttatcagagaaaacagttcttctgctggtgactccatttctggcagcagcctggagccttcatccctaagtcaacaccaggagagcttctcccaaactccccgttcctgcgtagtccgctttctcttgctgccacattctaaagg

SEQ ID NO: 503 - DNA, 472 bp, Homo sapiens
gcactggagggcaaaacggggcggtccttatcctatttaatgtgttcggcctttaattctgttttgcctgctatagtattgccattgccacctggactttctgtttgcattttcttaatgccttttccctatttctgaattttaactttttgtgaggctttattttagatgtttagcatgtaactcgcttaaagttgaggtttccccctaaaatctacaagtttccctctttcagtcatgagccctacacatttgcatgaaagatgtacatatatattgtgaacgaaaaaagcaattttcaaatggtatatatgtatcccattttgtaaaaaatgtatattatatattaatatgcaaagaaaaagctaaaagtatagacttcaaaggcataacagtggttgtgtggtaagatataggtgattttttaaatttttgttttatctgaatttctcattttttcaggacaaacgtt

SEQ ID NO: 504 - DNA, 135 bp, Homo sapiens
gaggcaaatggatctcgatatttcagatgggcttttgatgcactgttgccaaggaaggctttttctgattttttgacaaatgaatttttgcacactttcattggtgtctttcggcaacttacacacattgaaaat

SEQ ID NO: 505 - DNA, 252 bp, Homo sapiens
  misc_feature (63)..(63): n is a, c, g, or t
  misc_feature (159)..(159): n is a, c, g, or t
tcattcttggtagcctattatgtaaacatttaggtgggattccagattcagatttgaaacttnaaacctgaaaggcccattgagaaggccagtatctgcattatcattcatgtaatctctctacattatacagaagtgctccaagaatgagaaaaaaantacattgagcaaatgaaatgttaaaatgtacatctgcaataacctcattggactcttaaaaaatattgtgttttaacgtatttcttctttctg

SEQ ID NO: 506 - DNA, 295 bp, Homo sapiens
aattaaggaagacttcagatgccctttctaaggcacaaaatgatgtgatggaaatgaagatgcagtcagagagactttcgaaagaatatgatcaactcctgaaagaacactctgaacttcaggatcgtttagaaagaggcaacaagaaaagactgtgaactttataaaagacacttgcaatatactgtgtcaaaatgataattttgttatgttagcctctagaaaatttaagttcagaaaaatgcactatgaccggttcgtaatttttttaatgccacacataggttgtattgta

SEQ ID NO: 507 - DNA, 497 bp, Homo sapiens
ctcagtaatgactcaagcctctggctattaacataccctagttgccgttttttaattgccatgagccaaatacttcttggtatacaattgatccatttattttaatggctgccttttcattttcatcttttcttgctgctacccatctatgtatgtagtcattggggggaaaatgtagccacattttttatgggaagactttgtgttaaaagtgaacattttgaaggtttttaactggtgaaactagcctggaataatgccaccagagactgagtggaaatcgccccttttgaaggtgccattcttatgagccaaaagtttgtcatttaaaagttcattttgagggaataacatgtaatataatttgaaataaaggtatagtaaccttaaaaagaacattataactgattgttgtgaatggggtgaatttgttaaaatgagtaactttgataaagtttttcatgcacaggcaaaatgtattcactagatttctacgt

SEQ ID NO: 508 - DNA, 251 bp, Homo sapiens
agagaacttctagtgtatggatttaaagatttctctttttcattcatataccattttatgagttctgtataattttttgtggtttttgttttgttgagttaaagtatattattgtgagatttatttaataggacttcctttgaaagctgtataatagtgtttctcgggcttctgtctctatgagagatagcttattactctgatactctttaatcttttacaaaggcaagttgccacttgtcatttttgtt

SEQ ID NO: 509 - DNA, 521 bp, Homo sapiens
  misc_feature (89)..(89): n is a, c, g, or t
  misc_feature (92)..(92): n is a, c, g, or t
  misc_feature (269)..(269): n is a, c, g, or t
caaggccactagaaaattgacagttaagagccaaaagtttttaaaatatgctactctgaaaaatctcgtgaaggctgtaggaaaagggngantcttccatgttggtgtttttcctgtaaagatcagtttggggtatgatataagcaggtattaataaaaataacacaccaaagagttacgtaaaacatgttttattaattttggtccccacgtacagacattttatttctattttgaaatgagttatctattttcataaaagtaaaacnctattaaagtgctgttttatgtgaaataacttgaatgttgttcctataaaaaatagatcataactcatgatatgtttgtaatcatggtaatttagatttttatgaggaatgagtatctggaaatattgtagcaatacttggtttaaaattttggacctgagacactgtggctgtctaatgtaatcctttaaaaattctctgcattgtcagtaaatgtagtatattattgtacagctactcataattttttaa

SEQ ID NO: 510 - DNA, 476 bp, Homo sapiens
  misc_feature (336)..(336): n is a, c, g, or t
  misc_feature (413)..(413): n is a, c, g, or t
agtacttcttttattgcacattcagagaattttatatatatgtcttgtgtgcgtgtccttaaacttccaatcttactttgtctcttggagattgttgaacgcagcttgtctaggaaggggatgggactagattctaaaatttatttgggaccatgggaatgatagttgggaagaaaactatttgcacacgacagatttctagatactttttgctgctagttttatgtaatatttattgaacattttgacaaatatttatttttgtaagcctaaaagtgattctttgaaagtttaaagaaacttgaccaaaagacagtacaaaaacactggcacttngaatgttgaatgtcaccgtatgcgtgaaattatatatttcggggtagtgtgagcttttaatgtttaagtcatattanactcttgaagtcaaatgaagcagagcccgggcgttggcagtgtagccataactttctgatgtt

SEQ ID NO: 511 - DNA, 532 bp, Homo sapiens
ggacgtgtctttcatgtacctgaccttcttcctcgaggacgacgacaagctcgagcagatcaggaaggattacaccagcggagccatgctcaccggtgagctcaagaaggcactcatagaggttctgcagcccttgatcgcagagcaccaggcccggcgcaaggaggtcacggatgagatagtgaaagagttcatgactccccggaagctgtccttcgactttcagtagcactcgttttacatatgcttataaaagaagtgatgtatcagtaatgtatcaataatcccagcccagtcaaagcaccgccacctgtaggcttctgtctcatggtaattactgggcctggcctctgtaagcctgtgtatgttatcaatactgtttcttcctgtgagttccattatttctatctcttatgggcaaagcattgtgggtaattggtgctggctaacattgcatggtcggatagagaagtccagctgtgagtctctccccaaagcagccccacagtggagccttcggctggaagtccat

SEQ ID NO: 512 - DNA, 369 bp, Homo sapiens
  misc_feature (53)..(53): n is a, c, g, or t
  misc_feature (283)..(283): n is a, c, g, or t
atgccttctcaagacctgatgaaaggaataagatatttgtgcctttttataanagcatctattacgaaagtaaaattcagttgcttacagttttggccgctttgtagcactattataaacagcccaaatttatggccttggacttactgcatgacacatggcctggttacctgtcatggaatgctgcagtggtggtttgccaagcttctgtggatgtttgaagactttatttttgcagtcttaaccttgggctggacctaagtgtatgtaaaccatatgatgnctgtattgtttatagatgctgacaaaagaaaactagaccttttgttttttgttgtaagatttttgttttcatgcctatgctcatag

SEQ ID NO: 513 - DNA, 391 bp, Homo sapiens
atgtaattgcccttgtgtgtagttaaaatgagtcatcatctggtcctttgtgaaatggaattcatggtattttctgtaacgttttcctgaagctgtttctggagagccacacatttaaatacagacagctttcctgatcatttgatttattgtgcacctgatttttggtctaaaaggaattattgccacaatatattttatttattctttagattttagccttgtaagttaaagtgctttacatgatgatgtgaaaagctgtttgtccctttactgggtttggggggttgttaaaagatagggaatgaagaatgcaaaatggtttatcgttcaaactgtccactctgatccaaccctgtactgatagtacttcccagtatgatattgtgat

SEQ ID NO: 514 - DNA, 492 bp, Homo sapiens
gacctcacagacaaagccattgctagaaatgtcattccaatgatcagatctggaaacaggctgccataaccacttttccttcttgtagactcagctcacctgtatatttaaactgttcttggcatcttgaaacacctatttctactcaggtactcattgtcctgttactgattcacctttctgatccttttcaaccagttttcccccaaggggggaaattttacttaacctctagtatttgaacaactcaatatttgaattgttgccccatttgcttttacctgtactgtattcttggtcatctcaaatggcgtctaaacccagctactttgcattccagaagtttccattccctccaattccacctaatttttcatctgtcctagttactggctctttcttcatgtcttatttctcttgctttgggagcttaaaagattttacaagacctaattttgggttccttccttggagccatagttaccctgccaa

SEQ ID NO: 515 - DNA, 470 bp, Homo sapiens
aaagtgtcttctttggaccagatttcatcactgtcacaaaggaaaatgaagaattagactggaatttactgaaaccagatatttatgcaacaatcatggacttctttgcatctggcttacccctggttactgaggaaacaccttcaggagaagcaggatctgaagaagatgatgaagttgtggcaatgattaaggaattgttagatactagaatacggccaactgtgcaggaagatggaggggatgtaatctacaaaggctttgaagatggcattgtacagctgaaactccagggttcttgtaccagctgccctagttcaatcattactctgaaaaatggaattcagaacatgctgcagttttatattccggaggtagaaggcgtagaacaggttatggatgatgaatcagatgaaaaagaagcaaactcaccttaaaataatctggattttctttgggcataacagtca

SEQ ID NO: 516 - DNA, 487 bp, Homo sapiens
  misc_feature (190)..(192): n is a, c, g, or t
  misc_feature (194)..(200): n is a, c, g, or t
  misc_feature (308)..(308): n is a, c, g, or t
aatacctgtagttcagttagtaactttttcatatatagcatgttgcctgtatgcagttgaactatataaagttcattgcaaagcagattatcttgtttttttgcatagcaatcaaagttgaaatttgtttgctacatcaacaaattaaggacattttcacaaactgagaaataaacaaatatgccaattnnnannnnnnnttgccttatcctttgaatgtgacttaaaatcagcaatgatgatatagtaaatactgaaatttaggtgtaaatcaatacgttctacagggaaataatgaggctaagtanttttatgtttttagtggttttttagaaacctaatcttatagccgccattagcattactagagttatgcaaataattgcattataaacatgtttataacttagccaaaacattgatttttataactctccaagtatgagttgaaatttcttatgtcttttgataaactgcagtattcttt

SEQ ID NO: 517 - DNA, 492 bp, Homo sapiens
gctttctgcttgctacatttgtctcccttacttttcttgagctaaagacaggctttttccaccggcatcatcactgctatcatcattaacagcgtaattatacaagcatatttaatgctgagtttaatttaatatgtaatacatatggtaattgtagggtaatacccacaacaactgtagtttcttacttggccaagagaatgcttatttaagtgttagacttccattctggcaaaatcttgccttatcagaagacattggaaagagggattccctttggtgtttggtcttctacttagaaaaacctattgcagttagtttatcttgtagtattcatctttgtattctgaagataaggtttgaattaaattgatacacacagaggggaaccgattttttttatccaatgtgaattataaatgagataatccacagttattcattgtggagttgttgagactatgaaagactcattgtctttgtattcagctc

SEQ ID NO: 518 - DNA, 443 bp, Homo sapiens
aacagctgtgcatccaatttattatagttttgtaagtaacaatatgtaatcaaacttctaggtgacttgagagtggaacctcctatatcattatttagcaccgtttgtgacagtaaccatttcagtgtattgtttattataccacttatatcaacttatttttcaccaggttaaaattttaatttctacaaaataacattctgaatcaagcacactgtatgttcagtaggttgaactatgaacactgtcatcaatgttcagttcaaaagcctgaaagtttagatctagaagctggtaaaaatgacaatatcaatcacattaggggaaccattgttgtcttcacttaatccatttagcactatttaaaataagcacaccaagttatatgactaatataacttgaaaattttttatactgaggggttggtgataactcttgagga

SEQ ID NO: 519 - DNA, 113 bp, Homo sapiens
aggccatctcctaatggaccaaggaccccagagcccacctgtgtgacgctgcctttttatacactgtcctcctccaccttgatggacccctagtgatgcatcctgcctaggct

SEQ ID NO: 520 - DNA, 485 bp, Homo sapiens
gagaagctgctcaacttgcaaaatcagttttcctctcaataaaattatagctctaatgtttgcatataagggaagtagttatcatgttagtaatacctctaatagtataaaccccaccccaaaattagccagtaatcctgtaggaaggtactgtatgatcaaatgtttaatcatataaatagaatgtaaatgtctcactgagcactgttttctagtgtatcaaaatgctcttatttcatcattcacttcactgtgctgttgttatgatgtgcttaacagggaacgtgattagtgaaaggaagataaacgtggatgttactccaaaacttcgtttaatgaatgcttaaagaattcaaattttatctgcctctcttgtaatttggatctcttcttaatgtacatagtgctaacatgaagacctttttctgcactatatgcaaacagggtaactaactaaaacaaagccactttcaatcttcaatcct

SEQ ID NO: 521 - DNA, 409 bp, Homo sapiens
gagcgttacaagcgcacctttgaccaaaatgaggagctagggctcaatgacatgaagacagagggctatgaggcaggcctggctccgcaacggtagcagtgggtggctcaagggccagcctccagcgctgctctttctgtaggttatttattagtattggatgaaggcgaaggctgggagtgtctttcccaccagcccttgcccatggtggggaggacatctggtttgagtcagagatctgtgcacactttttaaacagcttgtgatgcaagtgtgagcctattgtgttacttgaccttattttggaagttttgaattggcctaggaggaaacccagaaatgaaccaggggtatgtcatcacttttttcatatcaagtcctcaccctccttccacataatgctttatcc

SEQ ID NO: 522 - DNA, 307 bp, Homo sapiens
tgaagtgatacacagatgtctttcctccccacaaacttttttaaacaaaaaacaagacctcttttctttagatggtgccacctatgcccaccacaacagagattttacatggaaaccgggctcagtgagaactgatttcctgcccaatatttgtctttgggctgtctctagtgactaattattaaggaatctagctggttatacagttcaaggctttctatgttgttaatgaacctcaaaatagccgttaagacatgaaatacagcagcaggttaccaatgcgaacaggtagttcgcatttatgtaa

SEQ ID NO: 523 - DNA, 287 bp, Homo sapiens
  misc_feature (262)..(262): n is a, c, g, or t
agtatatttctatgggtgggtctaatttggtaacggtttgattgtgcctggttttatcacctgttcagatgagaagatttttgtcttttgtagcactgataaccaggagaagccattaaaagccactggttattttatttttcatcaggcaattttcgaggtttttatttgttcggtattgtttttttacactgtggtacatataagcaactttaataggtgataaatgtacagtagttagatttcacctgcatatacattnttccattttatgctctatgatctga

SEQ ID NO: 524 - DNA, 521 bp, Homo sapiens
ttcctggtcatgcactacagaggacagactgtgaaaggtgtcgctttcctcgcttgctacggcctggtcctgctggtgcttctctcacctctgacgcccttgactgtagtcaccctgctccaggcctccaatgtgcctgctgtggtggtggggaggcttctccaggcagccaccaataccacaacgggcacacaggccagctctcagccatcacagtcttcctgctgtttgggggctccctggcccgaatcttcacttccattcaggaaaccggagatcccctgatggctgggacctttgtggtctcctctctctgcaacggcctcatcgccgcccagctgctcttctactggaatgcaaagcctccccacaagcagaaaaaggcgcagtagagccagctactggagtcattccgtttccactcattcacccaacctcagggttctccccatctgagccagcctgctggtgtgacttactcatcctccattcctctgcacttgcagactttctgagccagg

SEQ ID NO: 525 - DNA, 545 bp, Homo sapiens
tttattttgccaaccgtgtttatagaaaggacattactaatgacattttgcagattaaaaacattcatttgaacacagtagtcccctagaaaaacaactctacaaaaattttgcagccttattcattataattttgataaaattaacacaaaatcagtcaagaaggaaacatgtatattagtgaagtgtttttggagactgtttgaatgtgaccaaatgtggttctagttgacttcttttcactttggcttatatcaattcttgagagttaatgtgatcatgatattgcaaacaactataaatggtctctaggccttactttgtgattatacgttatctccggctagaaaaaaataatggtagtaaagaaactgacaaactgaaaataagaaaacaaaaatcaaatgcctataataccataatgccagtttggtatagagtccaactttaaaacatgaattgctcgacagagttctattcagtaggtgtttccttgtattgtcttttgtgaatttattatgaaaatgctgcgttgtgttgaatga

SEQ ID NO: 526 - DNA, 440 bp, Homo sapiens
atacctgtcacccagggtatcttaaaagcaagttgttctcccactactttcctttccctctgccctgccattcctattacaatgctgtgaaaaaagttctgcttcttaggtgaatgggtactttctattttgtttctaaacgagcaattttgaggatgaaatgggaagatatcattgcttcctttttgcacctattgggtatgtacactctggccgaagggagtccttatgtttagtttcaaaatatattactttcctggattctcttcttcactttttctgactttgggtccattttcttttcattgcctccttttccaggcagctctattcttgcagagccatagcaggacatgttaaaattccaatagaaaacactaaaaggaaagtctgtggaatcactagtgactaaatactgggaacctattttctcaatcttc

SEQ ID NO: 527 - DNA, 337 bp, Homo sapiens
  misc_feature (292)..(292): n is a, c, g, or t
tcggctgctgtgggccaacaagcctgataagctgcagcaggccaaggacgagatcctcgagtgggagtctcgggtgactcaatatgaaagggacttcgagaggatttcaacagtggtccgaaaagaagtgatacggtttgagaaagagaaatccaaggacttcaagaaccacgtgatcaagtaccttgagacactcctttactcacagcagcagctggcaaagtactgggaagccttccttcctgaggcaaaggccatctcctaatagactggacttaaccccttcctcccngtccccacgaccaactgtccccagttactctaaccgttatttcat

SEQ ID NO: 528 - DNA, 504 bp, Homo sapiens
  misc_feature (262)..(262): n is a, c, g, or t
  misc_feature (265)..(265): n is a, c, g, or t
  misc_feature (271)..(271): n is a, c, g, or t
  misc_feature (316)..(316): n is a, c, g, or t
tgagctgtcatttatggagggtgcaatcatttatgttataaagaagaatgatgatggctggtatgaaggagtctgcaatcgagtgactggtctgttccctgggaactatgttgaatcaatcatgcactatactgattaatttttttttttcttttgaagtagattcttattactcagtcatactgtgggactattatggttaacagaactgtcttaatatgttttaaaatgtgcccatattttcagaacatgctgttttatnggntaaatngaatgtctacctgtaagcataaatctttgaggcagtttatgtatngctgaatagcaatttatacaagaagctgtccataactgattatgcttatgtacttacttacacatttttaactttatgaccagcctaaatattctgggggaagtggggtataatatttaacgaatcatgattcagattgtaccattacatgtttcagtgcagcatggttactaacgctatgtcagact

SEQ ID NO: 529 - DNA, 314 bp, Homo sapiens
acagtcattggatgcagcggttttcatggagactgtcttacgctgacaaagattattgaagcaagactaaagatgtataagcattccaataataaggccatgactacgggggcaattgctgcaatgctgtctacaatcctgtattcaaggcgcttctttccatactatgtttacaacatcatcggtggacttgatgaagaaggaaagggggctgtatacagctttgatccagtagggtcttaccagagagactccttcaaggctggaggctcagcaagtgccatgctacagcccctgcttgacaaccaggttgg

SEQ ID NO: 530 - DNA, 423 bp, Homo sapiens
ataagcgaacggcaggtgtctacagaagaagcccaagcttggtgcagggacaacggcgactatccttattttgaaacaagtgcaaaagatgccacaaatgtggcagcagcctttgaggaagcggttcgaagagttcttgctaccgaggataggtcagatcatttgattcagacagacacagtcaatcttcaccgaaagcccaagcctagctcatcttgctgttgattgttagattgttgatgcattctaaccaactcacacatatacacaaaatcaacatggggatggagaagagaattagcgtttgcagcagtgtatcatctactaataaaattaaactaatgttgctgcttcattagttggtgggagaagggacacatccactcttggaggaatatatttactcaataatggcaccttaca

SEQ ID NO: 531 - DNA, 493 bp, Homo sapiens
aactctccaagtacctgcgggattactcaaggactattccaggaaaacagcagctgttgattggggcttatgccaaggccttggagattatcccacgccagctgtgtgacaatgctggctttgatgccacaaacattctcaacaagctgcgggctcggcatgcccaggggggtacatggtatggagtagacatcaacaacgaggacattgctgacaactttgaagctttcgtgtgggagccagctatggtgcggatcaatgcgctgacagcagcctctgaggctgcgtgcctgatcgtgtctgtagatgaaaccatcaagaacccccgctcgactgtggatgctcccacagcagcaggccggggccgtggtcgtggccgcccccactgagaggcaccccacccatcacatggctggctggctgctgggtgcacttaccctccttggcttggttacttcattttacaaggaaggggtagtaattggcccactct

SEQ ID NO: 532 - DNA, 337 bp, Homo sapiens
ttattgatatttgtgcttctgcctaaagtggtcaacacaagtgatcctgacatgagacgggaaatggagcagtcaatgaatatgctgaattccaaccatgagttgcctgatgtttctgagttcatgacaagactcttctcttcaaaatcatctggcaaatctagcagcggcagcagtaaaacaggcaaaagtggggctggcaaaaggaggtagtcaggccgtccagagctggcatttgcacaaacacggcaacactgggtggcatccaagtcttggaaaaccgtgtgaagcaactactataaacttgagtcatcccgacgttgatctcttacaactg

SEQ ID NO: 533 - DNA, 437 bp, Homo sapiens
  misc_feature (40)..(40): n is a, c, g, or t
  misc_feature (67)..(67): n is a, c, g, or t
  misc_feature (72)..(72): n is a, c, g, or t
  misc_feature (105)..(105): n is a, c, g, or t
  misc_feature (146)..(146): n is a, c, g, or t
  misc_feature (162)..(162): n is a, c, g, or t
  misc_feature (165)..(165): n is a, c, g, or t
  misc_feature (202)..(202): n is a, c, g, or t
  misc_feature (212)..(212): n is a, c, g, or t
  misc_feature (235)..(235): n is a, c, g, or t
  misc_feature (264)..(264): n is a, c, g, or t
  misc_feature (297)..(297): n is a, c, g, or t
  misc_feature (309)..(309): n is a, c, g, or t
  misc_feature (342)..(342): n is a, c, g, or t
gactgctgtggatgtttttcgaaggataattttggaggcnagaaaaaatggacggggcagcttcacnaggcnagtcttcatgctcggtgatgtgattctgctgcnaagcctgaggacactgggaatatattctacctgaagaagcnaactgcccgttctccntgnagataaactatgcttcttttttcttctgttaacctgnaagatatcantttgggtcagagctcccctcccntcagattatgttaactctgagtctgtccnaatgagttcacttccattttcaaattttaagcnatcatattttcnatttatatattgtatttcttaatattatgaccnagaattttatcggcattaatttttcagtgtagtttgttgtttaaaataatgtaatcatcaaaatgatgcatattgttacactactattaactagg

SEQ ID NO: 534 - DNA, 379 bp, Homo sapiens
tgaaggcctcgggtgcactaaaagagtacaaggtggtggtctctctttgcccacccccaaatgccacacactgcccctctactgcatgcgaatctttgcgcctaaatcatgtcgtcgccaagtcccgcttctggtactttgtatctcagttaaagaagatgaagatgacttcaggctggattgtctactgtggacaggtgtttgagaaggtccccctgcgggtaaagaacttcagcgtctggctgctctatgactcccggagctgcacccacaacacatacagggaatactgggacctgaccaccatgggccggcaccgcacccaggcccactgcatccagatcatgaaggtggaggagatcgcagccaacaagtgccg

SEQ ID NO: 535 - DNA, 502 bp, Homo sapiens
  misc_feature (354)..(354): n is a, c, g, or t
gcaggtggcttgttaaggaacgctagcagggcatggcacgtgagctccggaatagatgtcttcatcacttcttccactgtgtgttgacactgttttccttacctatttcctcagatccccagctttctcctctgctatgcattttcttcacagtgcagcttgcagtccgttgctgaaaatgattataagccctgcataatgttaagctttattgtgattacgtgtatgtttcttctttcttttaagcagacccatacctttccagggtcaaagtacagaatagaatacattgatacaaagtacagaaaaatactttgatttttatccatttcttttactctgtgtaaagacttnagaagtctaattcacaggcaaaccaatacagaattgactgcagttgaacagactagaagtatttgtgggaggagtgacatgaagcatgagttatctgattttttttgtagctgctatatattttaagccttcatttgcaattcatgta

SEQ ID NO: 536 - DNA, 298 bp, Homo sapiens
aaccttggatttaccagactgtcttttcactgtttgtgggttttgtagaagttacacatttttatggtagataaaatgttacttctatacaagtactcactccctttttatcaaaagttaattttaatctcacagtctacattgtgctacattatccagcttctttggaacaatgtgtgctctgtatggttttttttggtatgacaactaattaagcaactgacattgaactgagaattctacaaactataaaacattaatttttgaaggtaatttagttttgtggctgggcattcag

SEQ ID NO: 537 - DNA, 494 bp, Homo sapiens
gatccgtcccaggcagtggattaggaggccagaaggagatcccttccacggtgctaggctgagatggatcctctcagggcccaacagctggctgcggagctggaggtggagatgatggccgatatgtacaacagaatgaccagtgcctgccaccggaagtgtgtgcctcctcactacaaggaagcagagctctccaagggcgagtctgtgtgcctggaccgatgtgtctctaagtacctggacatccatgagcggatgggcaaaaagttgacagagttgtctatgcaggatgaagagctgatgaagagggtgcagcagagctctgggcctgcatgaggtccctgtcagtatacaccctggggtgtaccccaccccttcccactttaataaacgtgctccctgttgggtgtcatctgtgaagactgccaggcctaggctctctgtagagagtcttcaagatcccggagtggtagcgctgtctcctggtgaaggag

SEQ ID NO: 538 - DNA, 409 bp, Homo sapiens
aagtattttccagcagtccaaagatgtaagttatcttacacataaaatgttttattttgttatttggttatgaaaatggaatccttgttcttgcacaactgtaaatgttttgttgctagataatacgatttgagacctgaattggtctttggtttccagtgcatcacagcatattttgtaaaatcatctactactgcacttgagcatgaatgggtagtagccaaactcacaaattggagtgatgaacctgcttatacctaagggcaggagcaagcccctcacaatgcagctgcatgggtttttagtgcctactgaattatatatatatatacatatatatatatatatataaaccaaaagtagttggaaagattatttgaaatgactaactttgtgctatctttatgaa

SEQ ID NO: 539 - DNA, 511 bp, Homo sapiens
ctaccgccttgttttaggagcctgcctcctgtcagtatgaaaccctcacctgaaaaatgccagcctggacaccaaacactgagccccttcaacaggcacattatttccccctgagatccataagggaatttagtttctactattgtagagttctgaaaagaggtaaaatagtagtcctttggtcatcctatttttgctttcaattttgatatttcagactgtaaaaggccttgggggatgatagtacatgtggtagcagtaatttttttgaagcaactgcactgacattcatttgagttttctctcattatcagattctgttccaaacaagtattctgtagatccaaatggattaccagtgtgctacagacttcttattatagaacagcattctattctacatcaaaaatagtttgtgtaagttagttttggttaccatctaaaatatttttaaatgttctttacataaaaatttatgttgtgttttaaaatccttaggggctttatctat

SEQ ID NO: 540 - DNA, 261 bp, Homo sapiens
  misc_feature (131)..(133): n is a, c, g, or t
  misc_feature (136)..(139): n is a, c, g, or t
  misc_feature (143)..(145): n is a, c, g, or t
ggagagtatggcggctggtacaaagcctgcaaagttgatagtccaactgttacaaccactctaaaaaaccttggggcactttacagacgtcaaggcaaatttgaagctgcagaaacgttagaagaagctgnnntgnnnnctcnnnaacagagggtggcagaagtgctcaatgaccctgagaacatggagaagcgcaggagccgtgagagcctcaacgtggacgtggtcaagtacgagagtggccctgacggaggggaggaa

SEQ ID NO: 541 - DNA, 352 bp, Homo sapiens
aaattacccatattgactttcacacctcatataatcagatctattacaaatatatatcggagtgacggtgcccaggatagatgtaatatttcttacagatgctggcacagaggaaataatataccagctaatctagtcacctaaccttgtggttagaattgcaattttaagaccagaaaaatttgaagtctgatcagagatttacaactgttcattatagtggtgccttaggcaatctttccaaagtaaattcagggccccattgctacttatgccatatttggacatactttttttttcttcaattttgtaaacttcctggaaagctgtcttcactaagtatcccctagtc

SEQ ID NO: 542 - DNA, 519 bp, Homo sapiens
ttggctcttggtggaattgaattcatcttgtgtcttattcaagtaataaatggagtgcttggaggcatatgtggcttttgctgctctcaccaacagcaatatgactgctaaaagaaccaacccaggacagagccacaatcttcctctatttcattgtaatttatatatttcacttgtattcatttgtaaaactttgtattagtgtaacatactccccacagtctacttttacaaacgcctgtaaagactggcatcttcacaggatgtcagtgtttaaatttagtaaacttcttttttgtttgtttatttgtgtaacatactccccacagtctacttttacaaacgcctgtaaagactggcatcttcacaggatgtcagtgtttaaatttagtaaacttcttttttgtttgtttatttgtttttgtttttttttaaggaatgaggaaacaaaccaccctctgggggtagtttacagactgagtgacagtactcagtatatctgagataaactctataatg

SEQ ID NO: 543 - DNA, 490 bp, Homo sapiens
tatagcaagagccctgggcaaccccaaacctagtcctggtagctgagcaccctgtaaggcaggagcaggcagctcagcttgagcagacattgggtggggggtggggggtggttgaggggggaggcagcacagtgcagcaaatgtttcttgggaggaagaagcctgatccatcaccatctgcttgactatgtagcttggattctcctttgtacctatccctttcgatttggctttaccttcatctatcttgatcctttcctggccaaatatcctcttgggcccaaatgaacattgtaccatagtcttctggaaagcaaacatgcttcctgctatgtaattgctaacattcatattagatgatgtgctgtagcttgatcttccttagcctactgccactgaggcagtaggttttaggtggtatcgtagtgccttttgattaatttaagtatttaattttcatcttccttctttggatctatttggcctctca

SEQ ID NO: 544 - DNA, 546 bp, Homo sapiens
attttgtacctgaagccttgtttggaattctaggctttctagatgatttctttgtcatctttttattgcttatctacatctctattatgtatcgagaagtgataacccaaaggctaactagatgaaaaaggaaacaaaactgagtttactaggatatctgagctaatgtagaacatcaaacagaaggacccatggcagtataaagcaatgaagcaatggagtattatctcacaaatataaaaccactataagacaaacatttgattatcatttgacaaatacctaggtataactggaattttcatgtttgaagttctaatattaagtttagaattataatgatctacagttgtatcttgattctatgttgtctggaaaaaatatggaattatataaaaagggatgcttttatatatttttcttttccccagaattacttagattaattagatgtatagtaaaatattgttaaatgtcagtttatccatcttatccttctcagcaggtacctatatgataatatatagctgtgaaactcatctaaat

SEQ ID NO: 545 - DNA, 177 bp, Homo sapiens
tttttgaaggccatggcttttcacacagttattttattttatgacgttatctgaaagcagactgttaggagcagtattgagtggctgtcacactttgaggcaactaaaaaggcttcaaacgttttgatcagtttcttttcaggaaacattgtgctctaacagtatgactattctttc

SEQ ID NO: 546 - DNA, 463 bp, Homo sapiens
gaaaagatacctttctgttcaacttgtatcaactcctcttttctaattgctgtgaaatggcaactgttgataaattattgtgattgttttaaaatctaatgggaagtaaaatatattttgattttacccagcttaatctgtaaagtagcacttaaatatatctgatagcaacacttaagatattgcatggggattactttcctatcatccatatgcatttgtgcaacttcaaacatattgggtgcttctgaattcctgatgattggatttaagctattgaaaattggataatttaaacttaatgatttttataattttctgatcttaaaatttggttaatgcctataatctgttgctttttctcaatatgtgtcctattggaaattcctcaaatcgttggtgccatcagtgatttacaaacaatattttgatattgcagatgacttgcttactgtatttgcat

SEQ ID NO: 547 - DNA, 390 bp, Homo sapiens
cagatggtcatctggattctcccacttctctactccattatttctctacttttccttccagcaaaccttgaaacgtgagggagatggattaatgtgagtaacaggaatgtgtctttaaaaagctagagtggttacatttaatcaggcagtaagataatttgggttcttgagttgttttggagtaatatcccacaactggggtaggaagctcaggacttttttctttaaagctagtcatttcaaaagcatattgtatttttttgaatgactacagtatggacaatttcaaaaaccaaaacccactttggattggtggaagtaaaaactggtaactcactcaagtgaatgaatggtcttgcattttaaaagcttatgggaaactcaatttga

SEQ ID NO: 548 - DNA, 239 bp, Homo sapiens
ctggggaccagcgaagaccaccagcacttcacctgcaccatctggaggccccaggggaagtcctatctgtacttcacacagttcaaggcagaggtgcggggcgctgagattgagtacgccatggcctactctaaagccgcatttgaaagggaaagtgatgtccctctgaaaactgaggaatttgaagtgaccaaaacagcagtggctcacaggcccggggcattcaaagctgagctgtc

SEQ ID NO: 549 - DNA, 571 bp, Homo sapiens
tggagtgcattttagtaagcctttgcagtaaaatgacggttgtaactactaaaccaaatttagttttcacagcatggttttgttgttttccccttgtttttcagaggtaaattttgcattatatccttcagtattttaacactattttggcagtttacacattactttttgtttttccttcctttttgtgaaatgtattaagttgtggttcttattgaaacagtattatataatgtttgcttaattatatcatgtgatgctcagttctattttgatttattcattagtattcacttttacctttaaagtttacttgtagcaaatatgtttacattgataaagccagatatgttttgacaatgaaatttacatatcaagtactgcaaataaaaggtggtgctatgatatatgcttaggaggacagttttaatgattgtacttgcatgaacacaatcatatgatggtaaagcagaaacttaagaaaaaattgtttatgtgttatattcaattagcttaaataagttgctttgttatattttatttgaattgaactacgctaggcctaaatgcc

SEQ ID NO: 550 - DNA, 566 bp, Homo sapiens
caacatgtaccattaactgaaaatcatacataactgtgattgaaatttggttttgataaaattatttttttaacataggatatgatgttttgttctaaataaatataggtctgcactgcaacttctgtatccttccttcccctccaccctcccccacaaaattcaagggaaagtaaagggtttaaaggaatgtgcatctttactaggactgtgttatagtgtggatactggaaaatgtatagctttttgattagggcaatggagtgcataaattagaaacttctaagtgcactggttttcaaagagatatatataatgcatttattctgtcaggttaaaatataaagtatgatctttatgattttttccctctaattatagaaagttaaataatgtattaccatgaaaaatgtttctaatattaaatagaacatatcagttgcaaagttcctaatgtgtatttttaaagcacatatctgaataaattgcctagatagaaaaaaaattatcacgagtaaaatttagtgttcaaaacattgaaacactcttcacctattgtatgacca

SEQ ID NO: 551 - DNA, 456 bp, Homo sapiens
tagaagttcccccaattacaaactggttttaaatattggacatactggttttaatacctgctttgcatattcacacatggtcaactgggacatgttaaactttgatttgtcaaattttatgctgtgtggaatactaactatatgtattttaacttagttttaatattttcattttgggggaaaaatcttttttcacttctcatgatagctgttatatatatatgctaaatctttatatacagaaatatcagtacttgaacaaattcaaagcacatttggtttattaacccttgctccttgcatggctcattaggttcaaattataactaatttacattttcagctatatttactttttaaatgcttgagtttcccattttaaaatctaaactagacatcttaattggtgaaagttgtttaaactacttattgttggtaggcacatcgtgtcaagtg

SEQ ID NO: 552 - DNA, 348 bp, Homo sapiens
tgcttcctctctagaatccaattagggatgtttgttactactcatattgattaaaacagttaacaaacttttttctttttaaaatgtgagatcagtgaactctggttttaagataatctgaaacaaggtccttgggagtaataaaattggtcacattctgtaaagcacattctgtttaggaatcaacttatctcaaattgtaactcggggcctaactatatgagatggctgaaaaaataccacatcgtctgttttcactaggtgatgccaaaatattttgctttatgtatattacagttctttttaaaacactggaagactcatgttaaactctaattgtgaaggcag

SEQ ID NO: 553 - DNA, 485 bp, Homo sapiens
aagcgacagggtatttcttccatgcaggaatctggaccaaagaaagtggcccctattcagagaaggaaaaagcctgcttcacagaaaaagcgacgctttaagactcataacgaacacttggctggagtgctgaaggattactctgacattacttccagcaaatagggaacagttttgccctggaacagagttacagatacacaatcaagagtgttcttgctgatgctcggggtctgaagactgtcttcctatctgcttcttgcggctgaggagaggagcagttcagtttacaaaacaagtgcaaattaccaaactcaaagcttatttgagtagaatgggctcatgggcaatgtgatgttccctgttaaccttctgttactccctgggagaaaggcgctgagcgtggcatgcaggtgtctttgctgtgtttttctccacttctaaatggttcctggttcctttcttcctcgtttgttactttagag

SEQ ID NO: 554 - DNA, 482 bp, Homo sapiens
gaatactgtagaattctgtttctttaacagtagcagggaaatgtaaactacaggtgacaaaaaatacccaggtaaacactggctttggtagaattgtgcagtcattaaaagtcaaaattttttgactttctttttaaagccaaagaccatagttttagttttaagccactaggtagatatttaggggaatagtcaaaatttactgttgaaaaagcagttgctatgtgctttcttaccctgttctgttccagttttgctggatttgtacatagccattctagaaatagagttgagggaaattatccatatacatatcactaataggcttcttggaattatttagaaaagcatttttaaactggcagtggatgactgaataggcatcatatttctttttgtgtgtcatttaaaagtaacaaaaactgccatttgacagtaaaggctcttggcttctgttggaggcatgggaaattgtctcaatt

SEQ ID NO: 555 - DNA, 455 bp, Homo sapiens
agaaactcaccctaaatctgaacgggtgccgctataatttgtgacatctggcaagatttccctttatgtatatattttaacaatccgcttggacacgaacaaagccacacttctaactgcttctggcgaactgattttatttttaatttttttcaataaagatattcttagatactgaaagaaatagttaatgagtttgcatttgtgcttgagaaaatttggctcaagtccatttggctgtagtgtcaacgatgtttccagtagtgtttagatttggtgtcttcaaaggtagttgattaaaaccaagtgtgtctttaatatcttgtatcagaataactttgtatgttaccaacttaaattgctagaataaggtaaattgatacacaactgctatttttaatttagaactttgacctaatttgggttttcaaaaccattttggctacttgtattct

SEQ ID NO: 556 - DNA, 406 bp, Homo sapiens
gagactaaaaccattcctcactgctctaacatgctgaagaaatcatctgagggggagggagatggatgctcagttgtcacatcaaaggatacagcattattctagcagcatccattcttgtttaagccttccactgttagagatttgaggttacatgatatgctttatgctcataactgatgtggctggagaattggtattgaatttatagcatcagcagaacagaaaatgtgatgtattttatgcatgtcaataaaggaatgacctgttcttgttctacagagaatggaaattggaagtcaaacaccctttgtattccaaaatagggtctcaaacattttgtaattttcatttaaattgttaggaggcttggagctattagttaatctatcttccaatacactgt

SEQ ID NO: 557 - DNA, 431 bp, Homo sapiens
gaagagttactccatgattgtgaacaatctcttgaaacccatctctgtggaaggcagttcaaaaaaagtcaagactgatacagttcttatattgtgtagaaagaaagtggaaaacacaaggtgggattacctgacccaggttgaaaaggagtgcaaagaaaaaaaaaagccctcctatgaccctgaaacagatcctagtgagggattgatgaatgttttaaagaaaatttatgaagatggagcgatgatatgaagcgaaccattaataaagcctgggtggaatcaagagagaagcaagccaaaggagacccggaattttgagactttaaagtcgttttgggaactgtgatgtgatgtggaaatactgatgtttccagtaagggaatattggtgagctgcatatataaatttgacagatagctatttacata

SEQ ID NO: 558 - DNA, 462 bp, Homo sapiens
ctctgttgctattgtcttctataagtggagtttcatgacttactgcttaacgaataactaactactatgatattctggacattttaggaaatggtaatttgccttgctacacattaagagggctattaagactacattttttctaacctcagataagtgcagtgtctttgcaatgccaacataagggagatcttggccaacgtgaaataaaattactcattcaaaactctgcctaaggtgattttgtagttcttaacagttctccagagcatcttgaacaggaatattaagataaatgtgaatctgcaatggctgaaaagagttgtgagcttttttattcatgataaaaccttataggaatagtataaaaaatccctgtggaaagctactagtacattgaccagcgctgggtgatacagattctgataaaaacataaatgtattagttcatctccatgtagt

SEQ ID NO: 559 - DNA, 468 bp, Homo sapiens
tactgatgcttctgatactggatgtttagcttcttactgcaaaaacataagtaaaacagtcaactttaccatttccgtattctccatagattgaagaaatttataccacatatcgcatatgaccatctttccatcaaatcaatgtagagataatgtaaactgaaaaaaaatctgcaagataatgtaactgaatgttttaaaaacagaacttgtcactttatataaaagaatagtatgctctatttcctgaatggatgtggaaatgaaagctagcgcacctgcactttgaattcttgcttcttttttattactgttatgattttgctttttacagatgttggacgattttttcttctgattgttgaattcataatcatggtctcatttcctttgcttctttggaatatttctttcaacacattcctttattttattatacattgtgtcctttttttagctattgctgct

SEQ ID NO: 560 - DNA, 451 bp, Homo sapiens
aaatagctagtttttttctgcatataaaagttcattgaaatgatatgcccttatttgcaatacttttcccataaagttttaagtgtgaaagaattgtaatttactagatatgtttggtatgggatattttgttaggcaagttttcttttttcttcttaaattgcaataggcttccaaaaagagtataattgtttcagaacaaattaactcttggcattatacgtctccctttttctttacagtattagtaaaaagaaaaattgtacactttctgattttaacttcactaatgtaattactctctcaagaagcttttaaaatttaaattaccatcacacaaccttttttatagtaaagccaacatttgttctctcaccaaaccccatgccaaattcatcatgaagaaagctcagcataagtagttcaaatactgcttataattttagagggg

SEQ ID NO: 561 - DNA, 568 bp, Homo sapiens
gaaggtgttcccactgatacaaaaaacaaggatggagttctggtggatgaatttggattgccacagatccctgcttcatagatttgcatcattcaagcatatcttgtaaaacaaacacatattatgggactaggaaatatttatctttccaaatttgccataacagatttaggtttctttcctttctttgaaggaaagtttaattacattgctcttttattttttccattaagagactcattgcttgggaaatgctttcttcgtactaaaatttgattcctttttttcttatgaaaaacgaactcagtttaaaagtatttttagctcgtatgacttgttttcattcattaataataatttgaaataaaactaaggaaatggaatcttaaaagtctatgacagtgtaactctacagtcctcaaaatgaccctgtaaatttggataagaccaaagatgagattattggggctggtcatattatgattcagaatccatttctattgtgggtattatagggttgggttaaaggtgatggccctttttgatgggttttgttgtgtcttgtgaa

SEQ ID NO: 562 - DNA, 484 bp, Homo sapiens
tgccgtggtatatacctgcagcctggatggcatcgtgcgcctctgggacgcccggaccggccgcctgcttactgactaccggggccacacggctgagatcctggactttgccctcagcaaagatgcctccctggtggtgaccacgtcaggagaccacaaagcgaaagtattttgtgtccaaaggcctgaccgttaatggctgcagcccctgcctgtgtgtctggtgttgaggggacgaagggacccctgcccctgtctgccagcagaggcagtagggcacagagggaagaggagggtggggccctggatgactttccagcctcttcaactgacttgctcccctctccttttcttctctttagagacccagcccagggccctcccacccttgcccagacctggtgggcccttcagagggaggggtggacctgtttctctttcactttcatttgctggtgtgagccatggggtgtgtatttgtatg

SEQ ID NO: 563 - DNA, 380 bp, Homo sapiens
ccaagatggccctgacttaatccttgtttttaaagaaaggaaatgtgcaatattgaagtgatctttttccctagtcagacaggcccaattccattgtgatgtttacctttatagccaggtgagtgcagtttgaacttgagatacagtcaactgagtgtttgctaggatcctaaggaacataaagttaattaaaaacttacacctaattatgtaaattgccttgttaaagacatgtgatttgtattttagatgcttgtttcctattaaaatacagacatttctaccctcagtttctaaatgtagactatttgttggctagtacttgatagattccttgtaagaaaaaatgctgggtaatgtacctggtaacaagcctgtta

SEQ ID NO: 564 - DNA, 444 bp, Homo sapiens
agaatctccccagacattttcttttttttttcacacatagatttaagtatcttgattgttagtagtctaaaaatgggaagaatgaaaaagcataactagatttttctatcttctgtggtcgcccgcccccccccaaaaaaataccatttatggttctctccgcaagtataaaagcattacatgcaaaaaaaagatctcagagaaaacaaaagtaaaagaaaagcagaaaatcacctgttatctactcccagaaataatcaatttcaacattttggtatatgtttttccaggcttctttgggttgatcccacctatgagatcagaatatgtatgcagttctttctttaacccttttttctcctatgtactgtgaacatttaaaaagtacttttaaatattctttggaaacttagcttttagtaactacttggttgtatcataatt

SEQ ID NO: 565 - DNA, 523 bp, Homo sapiens
aaatgttattttccctgtgatagaggatgacttcccagtttcaccaaagtctgtttatatcaacacacacaaaatggaataattctgagtcactaggcaatcaatctactgtggttttactatgtaaggtgaaaattaactggaacgatgtttgtttgctatacttacatagtcaaactttacaagccatgaaattaattgcactctttgtatttgttgttaaatgcctaagaagttttctaaaaattttgtaaaggcactgtcagagaatctggagttgaatgattattccagatactgtataacctgcataactttttgtctttaagtcgtgtttgtaaaagaagtaattgctagaaacatttgataatgtacaaagtagtctataatgactgttcagtacatttttaatatttttttggttatatccaactttttgtaaatatactggaagcttgataataaaatgtatttcctatcaccatacttttccatgtgaaaacctgagcctatttctagtata

SEQ ID NO: 566 - DNA, 511 bp, Homo sapiens
caccttttcttgcctgatcaacaatttgggcttcctgtttgtacaaggggccatttggcatacctttcacagcttttatcaggccaagttaaaggctgactacattttttcatcatgaggaaagcagttgaaatgaggcatgagttactgtgcattgggattttagaacaattttcttgtgacagctctttttgtgaagttaggttcttaaaagagcccatgatggtcacttaaaatgtgcagtaatagcactgccaggatcaagcatgaaaggcttttaaattagatcatcccacagacaatacgtttgataatagttttttcttttaacctctttaagtattgattctgcttgagaatattgaagtacttgccagaagttgtggatttcagttttaacaaatgctattaaagtggagaagcacactctggtcttggaattccatttgaggatttagaagtgtcatgtttataactattcagttgtgtttgttgctggcttgttgtaaag

SEQ ID NO: 567 - DNA, 376 bp, Homo sapiens
cctggttctggaatcctcagttcaaggttatcctacgcagagagccaggtaccaatgggtgcgctgcaatccagacagtaattctgcaaactgccttgaagaaaaaggaccaatgttcgaactacttccaggtgaatccaacaagatcccccgtctgaggactgacctttttccaaagacgagaatccaggacttgaatcgtatcttcccactttctgaggactactctggatcaggcttcggctccggctccggctctggatcaggatctgggagtggcttcctaacggaaatggaacaggattaccaactagtagacgaaagtgatgctttccatgacaaccttaggtctcttgacaggaatctgccctcagac

SEQ ID NO: 568 - DNA, 434 bp, Homo sapiens
  misc_feature (220)..(220): n is a, c, g, or t
aggaacgtttcctgcttgaaattatattgatttaaatgatgtgtgagatgtttcaccattttcaggcactgtgtaattctattgtaataaactggcaggtatctttgtaactataaatagtgcatgctcagccatgtacactgtaaatagcctttaccaaacgtgtttgacaaggaccataattaacatcacttagtgaattgtgataaagaaaaaaaangccatgatttattcgatgtgattggcttgtttttatgtggcgccaagaacgaacctgtttaacagctgtaaccaatggtactgatctatccatccaatgttgtcattatatttgactgtggttcaacagtattgcgttgtcagactaggaaagctaaacgaacaaaatggttttagttttgctgaagactggccttattaatggacagctttcc

SEQ ID NO: 569 - DNA, 519 bp, Homo sapiens
gatgactgcagatgtaatcgagcttaaagggaaattcctcatcaacttagaaggtggtgatattcgtgaagagtcttcctataaagtaattgtcatgccgactacgaaagaaaaatgcccccgttgttggaagtatacagcggagtcttcagatacactgtgtcctcgatgtgcagaagttgtcagtggaaaatagtattaacagctcactcgagcaagaaccctcctgacagtactggctagaagtttggatggattatttacaatataggaaagaaagccaagatttaggtaatgagtggatgagtaaatggtggaggatgggagtcaaaatcagaattatagaagaagtatttcctgtaactatagaaagaattatgtatatatacatgcagaaatatatatgtgtgtgtgtatctgtggatggatatatgtatatctcttcctatatatatccatagtggacttattcagaacatagatatgtattcagcttgtcttcaaatacggccaagcaga

SEQ ID NO: 570 - DNA, 466 bp, Homo sapiens
tgaggctttggcagtcttcatttactaccacttgttctttagccaaaagctgattacatatgatataaacagagaaatacctttagaggtgactttaaggaaaatgaagaaaaagaaccaaaatgactttattaaaataatttccaagattatttgtggctcacctgaaggctttgcaaaatttgtaccataaccgtttatttaacatatatttttatttttgattgcacttaaattttgtataatttgtgtttctttttctgttctacataaaatcagaaacttcaagctctctaaataaaatgaaggactatatctagtggtatttcacaatgaatatcatgaactctcaatgggtaggtttcatcctacccattgccactctgtttcctgagagatacctcacattccaatgccaaacatttctgcacagggaagctagaggtggatacacgtgttgcaagta

SEQ ID NO: 571 - DNA, 499 bp, Homo sapiens
tgtcatggacccgctacagacagcatctgtccagtggtttgaacgcacactggatgatagtgccaaccgacggatctgtttggccgaggcatttcttaccgcagatactatattgaatacgctgcagaacatttctgaaggattggtcgtgtaccccaaagtaattgaacggcgcattcggcaagagctgcctttcatggccacagagaacatcatcatggccatggtcaaagctggaggtagccgccaggtgcagagattcttagaagaggaggtgtatcccctgttaaaaccatatgaaagcgtgatgaaggtgaaagcagaattatgtctgtagagttggaagagaattaaacgaaaatcattgttaattgctgaggcatgaaaattgtgttactataatgccttattttacctcgagaattgttaccttaaattagtacagcactttcttcttcccatggtgctttcctgtttctcagtctcacatttctcaaca

SEQ ID NO: 572 - DNA, 532 bp, Homo sapiens
cactggcaggtatctgtgcattcatagaacttataaaggtcccaggatcacttttaagggatttttattagtttaaaggtaaataaagtcagctgaatctacatgtctcttgttttatttctctctaaacttgaaaacagtaaatctgcagatactgtgaggcacaaattatactgtcaacctactgttgctatggttatatactcccacttcatacattaccaagagtcgatcactgatttaaaatttttaatttctatagttaagatttactgcataatatagaatataaagttaagttaacatactaacatttctcctttggaggaagttttaatctacttcaggatgcatattattatcaagatactttcatatacaggatagcctaattttatttgtttaaatatgcttaatatgccccagattgcaaatgcatccagtcagtaatatcactgtctgtatgtggaggacatgttcccatggatcatatgtgaagatgtcaataagcttgcattaagccacctgcttt

SEQ ID NO: 573 - DNA, 431 bp, Homo sapiens
gaaaacatccggcaagacttctgaaaagacaatttagcaggtagaagaaaagttgggctttcacaaaaggcatctgaacttttaatgaactgtgaaggacaacagcatcttcccaaaaccattgatgtttaagtgtttagaaatcatagaaggtgtaggctgctgtggtaattctatttgtatatctcaacagaattaaaatgtctagcttggtggtatttttatagccataaaagaaaatctttaggctttcaaaataaggatgactttagaataatattgtgtcatagaattaattttcagccatgtggaccatattttgtatccaaggatccttatttaaagctttcaacatgtacaggaagttggaaatttttggtttatgactttgtctaataaagagatagttctaaacacattcttgatcacca

SEQ ID NO: 574 - DNA, 515 bp, Homo sapiens
attaagcattgccacatctaggaatggacagtatgttgcttgtggttctaattgtggagtggtaaatatatacaatcaagattcttgtctccaagaaacaaacccaaagccaataaaagctataatgaacttggttacaggtgttacttctctgaccttcaatcctactacagaaatcttggcaattgcttcagaaaaaatgaaagaagcagtcagattggttcatcttccttcctgtacagtattttcaaacttcccagtcattaaaaataagaatatttctcatgttcataccatggatttttctccgagaagtggatactttgccttggggaatgaaaaggcaaggccctgatgtataggttgcaccattactcagacttctaaagagactatttgaagtccagttgagtcacaagagaagcctgtcttgatatatcatctcagaaactttcctgaatatgtgataatatatggaaaatgatttatagatccagctgtgcttaagagccagt

SEQ ID NO: 575 - DNA, 417 bp, Homo sapiens
  misc_feature (81)..(81): n is a, c, g, or t
gtcagagcctgttcacatattgtgatcaggtagcaatgacatgtaccacttaaattattttatcgtcgatttggtagttcnattttaactactcaatgaaaacagccatgaatatcttttcttaaagagagttttgaaaatgatcacttacctaaaacttgaaagctatgaattagttatccatactctcatgacaattttgttggtgaacaacaaaaaagagatctatttctttaaaagatatttgtgcagaaactgcatgtaactctaagttttactcctaacatacatatgtttggggaagtattctattctatacttgccaatgtggagaacaaaatagttttttaagaatgaagaagtatatatatccattctgtattttacgtgcagcagaattatcttccgtaggatttt

SEQ ID NO: 576 - DNA, 387 bp, Homo sapiens
agactgatacactcaaccatctatattcatgagctctcaatttcatggcaggccatagttctacttatctgagaagcaaatccctgtggagactataccactattttttctgagattaatgtactcttggagcccgctactgtcgttattgatcacatctgtgtgaagccaaagccccgtggttgcccatgagaagtgtccttgttcattttcacccaaatgaagtgtgaacgtgatgttttcggatgcaaactcagctcagggattcattttgtgtcttagttttatatgcatccttatttttaatacacctgcttcacgtccctatgttgggaagtccatatttgtctgcttttcttgcagcatcatttccttacaatactgtcc

SEQ ID NO: 577 - DNA, 437 bp, Homo sapiens
gtttggaggctttcctattctagcatttaaatttaaattttattaaaattaaataatttaaatctagcatttaaatttaaataatttaagtctagcatttacttttaaataattataatgaagttttgaaatactaagttaatccagacctttagttgtcccatggtgttaataaagttgccaaagaagatgtattatgaacaattcagcaataagacaattgtcaacacagttgagaataacaatggtaatcgttagtaatatttagaattggaatttgcctactgaaatagttatagatgattacttgtgatgtgaaactgaattgagcatgacaaccagacatttccagttggttttgtaagttttgagaatctagatactgggttttattttttgaaagattagctctgtttgtaagggctgattccttgaaa

SEQ ID NO: 578 - DNA, 446 bp, Homo sapiens
  misc_feature (116)..(116): n is a, c, g, or t
gcatattccagtgtcagctttctttagctggaattgccaaatcatttgttgctcctgctgctctcatggtgccacgtttttttttttcaatgtttagtaatagtataatccatgtngtttgatatcaaaagtagaattacttttaatgtagtttttcttcattattgtcattgcgtgttcttaagttttacccctattagatggtaagaacaattaatgcagttttgcacaaatatttttacattctgatcattcagttctgtcattgtaatctttgttgttagaaacaaatgatgaaaacataggggttctgtaaacttttgtaatgctatgaattctgtttaaattttgggctgtctattttctgctgaaaccatgcaaaattgagctttggtggggctgggagggggttatgtattcatgggacctttaatttgtacagaaca

SEQ ID NO: 579 - DNA, 505 bp, Homo sapiens
ttagttaaggtgtgcagtgtttttcctgtgtattaaacctttccattttacgttttagaaaattttatgtattttaaaataaggggaagagtcattttcacctttaaactactatttttctttccaagtcatttttgtttttggtttcttattcaaagatgataatttagtggattaaccagtccagacgcactgatctttgcaaaggagacttaatttcaaatctgtaattaccatacataaactgtctcattatacgtatgcatttttttagtttgtttttgtttggtataaattaatttgttaattaaatatttcttaagtataaaccttatgaactacagtggagctacactcattgaaatgtaatttcagttctaaaaagatgtaataatcattttagaattaaaatttattctacttttaaataaattatgaatattaaaggtgaaaattgtataaattactttgattccattttaagtggagacatatttcagtgatt

SEQ ID NO: 580 - DNA, 562 bp, Homo sapiens
tcacttgtggttctacattcctggtgaatgatgaatgttgctgtcaaagggctgccccctaccttataagggttgctgggcatttgaaggcaggaagatttttaaagatagattgaggttggtttaaaattattcctgtaaaccaacaataaagcaaagaagaggttcatttttgtaaataacactggtttcaaatagtgatgttagacttaacctaatttataaacaagagattaatatctccatgcatagttttagacaaaaaaagatgtttcaataaaattactgtcttgtaatataaatgttgtccacttcccttttccacaggcctagaacagttaaagggaacataatttgtttaggctcccacataaatgtgaatctggccaacaactttggttcatcctttagtgaattagaggatttggctaccctgagtatatttatattcatttcttctgttctccttctgttattatacttaatcttctaaactaaactaatgtgaacagtagggaagcaagggcccaaatgcataagtttctttgcactgttgcactta

SEQ ID NO: 581 - DNA, 525 bp, Homo sapiens
gaagcaacaccagaaaatgatcctaactactttatgaatgaaccaacattttatacatctgatggtgttcctttcactgcagctgatccagattaccaagagaaataccaagaattacttgaaagagaggacttttttccagattatgaagaaaatggaacagatttatccggggctggtgatccatacttggatgatattgatgatgagatggacccagagatagaagaagcttatgaaaagttttgtttggaatcagagcgtaagcgaaaacagtaaagttaaatttcagcatatcagttttataaagcagtttaggtatggtgatttagcagaacacaagagagcaagaaaatgtgtcacatctataccaaattaaggatgttgagttatgttactaatgtatgcaactttaattttgtttaacactatctgccaaaataaactttattccctataacttaaaatgtgtatatatatataatagtttattatgtacagttaattctactgttttggctgcaa

SEQ ID NO: 582 - DNA, 444 bp, Homo sapiens
gcaatgcaaaggtagttctcactggaattggtgcagatgagcaacttgcaggttattctcgtcatcgtgtccgctttcagtcgcatgggctggaaggattgaataaggaaataatgatggaactgggtcgaatttcttctagaaatcttggtcgtgatgacagagttattggtgatcatggaaaagaagcaagatttcctttcctggatgaaaatgttgtctcctttctaaattctctgccgatttgggaaaaagcaaacttgactttaccccgaggaattggtgaaaaattacttttacgccttgcagctgtggaacttggtcttacagcctctgctcttctgcccaaacgggccatgcagtttggatcaagaattgcaaaaatggaaaaaattaatgaaaaggcatctgataaatgtggacggctccaaatcatgtccttag

SEQ ID NO: 583 - DNA, 152 bp, Homo sapiens
gtcttcgagggatagcacgaggtggtctgacaggactaacacttaccagcctctatgcactatataataactgggagcacatgaaaggctccttgctccaacagtcactctgaagattttgccaactcatgaatggaggacacttcagtagt

SEQ ID NO: 584 - DNA, 434 bp, Homo sapiens
tgtgttaatcacacagtatgctctctgaagttctcttaagccttcagtttatactcttaatttaattttctttctgagctggagaactggctttgcactttggttacacagaacattggtttccaattcagtttaactgaaatttgctgctgatatgttgagtttgttctttaaaaaatagctcatatatctcatctttcctcctgtcttagaagaacagacctaactagtgaatgtattaatgaaaatgcatctatttcagagctgacatgaagagtttagtttttttactttataaactgtgaatatgagtatgccagctgcatacgatgtaactaatcatatttaaatatatttcactttctctttgactttagaccttttgaagtctgtataaacttgttttgaaatatagtctctgcttacgaatgtca

SEQ ID NO: 585 - DNA, 475 bp, Homo sapiens
accgagacaaacccttgatgctccttgctcggcgttgaggctgtggggaagatgccttttgggagaggctgtagctcagggcgtgcactgtgaggctggacctgttgactctgcagggggcatccatttagcttcaggttgtcttgtttctgtatatagtgacatagcattctgctgccatcttagctgtggacaaaggggggtcagctggcatgagaatatttttttttaagtgcggtagtttttaaactgtttgtttttaaacaaactatagaactcttcattgtcagcaaagcaaagagtcactgcatcaatgaaagttcaagaacctcctgtacttaaacacgattcgcaacgttctgttattttttttgtatgtttagaatgctgaaatgtttttgaagttaaataaacagtattacatttttagaactcttctctactataacagtcaatttctgactcacagcagtga

SEQ ID NO: 586 - DNA, 556 bp, Homo sapiens
  misc_feature (55)..(55): n is a, c, g, or t
  misc_feature (126)..(126): n is a, c, g, or t
cactggccaagctgggccatgccagtgaccgcatcatcgccctggatggggacanccaaaaattccaccttctcggagatcttcaaaaaggagcacccggaccgcttcatcgagtgctacattgcngagcagaacatggtgagcatcgcggtgggctgtgccacccgcaacaggacggtgcccttctgcagcacttttgcagccttcttcacgcgggcctttgaccagattcgcatggccgccatctccgagagcaacatcaacctctgcggctcccactgcggcgtttccatcggggaagacgggccctcccagatggccctagaagatctggctatgtttcggtcagtccccacatcaactgtcttttacccaagtgatggcgttgctacagagaaggcagtggaactagccgccaatacaaagggtatctgcttcatccggaccagccgcccagaaaatgccatcatctataacaacaatgaggacttccaggtcggacaagccaaggtggtcctgaagagcaaggatgaccaggtgaccgttatcggggctg

SEQ ID NO: 587 - DNA, 539 bp, Homo sapiens
aaagcgaaacacacaaaccagcctcaacttacacttggttactcaaaagaacaagagtcaatggtacttgtcctagcgttttggaagaggaaaacaggaacccaccaaaccaaccaatcaaccaaacaaagaaaaaattccacaatgaaagaatgtattttgtctttttgcattttggtgtataagccatcaatattcagcaaaatgattcctttctttaaaaaaaaaaaatgtggaggaaagtagaaatttaccaaggttgttggcccagggcgttaaattcacagatttttttaacgagaaaaacacacagaagaagctacctcaggtgtttttacctcagcaccttgatcttgtgtttcccttagagattttgtaaagctgatagttggagcatttttttatttttttaataaaaatgagttggaaaaaaaataagatatcaactgccagcctggagaaggtgacagtccaagtgtgcaacagctgttctgaattgtcttccgctagccaagaacctatatggccttcttttggac

SEQ ID NO: 588 - DNA, 543 bp, Homo sapiens
gacagtttgacttgaatgcaacagcaggaaaattttgcaagttacataattgtatatacagtaggttttcttaagtctcttcggttcatcctttgtaatttgtgtgtgtatctgtagtattgcaggcttttggagactattcttacaggcagtatgtcagtcatcaaagaaaatgctgtcacctgccattgttgtatttgtgggtatttatagttgtatgtatgtaaatgcatcagtgtgtagattgcatatcagtgtatggtacatgtacatcaaaattatttttgtccttaatcagtgtgatatgaaaagcaagtacaacctcataggactgattatataatgaagttgttgagagtatatatagtggtattgttttattaaacttaaactcaaataatattttgattaaaatttttaataagactttatgctagaaaattctttgagctttgaatcaccagggcaaaaatgactttcaactaaccttgtgaatcttttgcagtgtactgtgtgcaataccaagggcatagctccctgtaa

SEQ ID NO: 589 - DNA, 530 bp, Homo sapiens
gttcaaccgcatggtatctttctgttgtgtgacttctacaaatgtaattttaaatgaaattaagttaacatggattcattacgttcctggccctgtagacacgtgtaagattatttaaaattctttcatttttttctgcctcttactatacgactgtagtgcaacaaatattttaaagcccccttttcttctttattttcattagttgtacattgatttcagtgtcaacacatttaaagattcattcatgttgcacagtggcttacatgaacgtgaaactgtgatataaggttttctttcatactcataattagcccaaaacagttgccaaactttgccattgtgctcctgcatttgtgtttgagctgctatatatttgtggaaattacactgaaagttgactaagagactattgaaaaagcatgaataattaaatatacatgtgagagacatctcatctgctgtattttacttagtgaatattgttcactcttccgtgtctgatgtcttgctgaatgctgtgactcata

SEQ ID NO: 590 - DNA, 214 bp, Homo sapiens
gaccacgtctcacccagggtgacatcaggaatggtgctagcctctgcaacacgacacccagtttgaagagctctatacaggtactaagactagcaggggacaccaagactctgcacaaccagattgcttgtgcagagggccacaataagtgtatgttttatattttattgtattatttattcaaaaataaataatacactcacatgtttccaca

SEQ ID NO: 591 - DNA, 547 bp, Homo sapiens
ggtgctggtcccttataaactaatccgggacagcccagacgccgtggaggtcacgggtctgcctgatgacatccccttccggaaccccaacacgtacgacatccaccggctggagaagatcctgaaggcccgagagcatgtccgcatggtcatcattaaccagctccaaccctttgcagaaatctgcaatgatgccaaggtgccagccaaagacagcagcattcccaagcgcaagagaaagcgggtctcggaaggaaattccgtctcctcttcctcctcgtcttcctcttcctcgtcctctaacccggattcagtggcatcggccaaccagatctcactcgtgcaatggccaatgtacatggtggactatgccggcctgaacgtgcagctcccgggacctcttaattactagacctcagtactgaatcaggacctcactcagaaagactaaaggaaatgtaatttatgtacaaaatgtatattcggatatgtatcgatgccttttagtttttccaatgatttttacactatattcctgccaccaagg

SEQ ID NO: 592 - DNA, 239 bp, Homo sapiens
atatttgatatacttctgcctaacaacatggaaaagggttttcttttccctgcaagctacatcctactgctttgaacttccaagtatgtctagtcaccttttaaaatgtaaacattttcagaaaaatgaggattgccttccttgtatgcgctttttaccttgactacctgaattgcaagggatttttatatattcatatgttacaaagtcagcaactctcctgttggttcattattgaa

SEQ ID NO: 593 - DNA, 419 bp, Homo sapiens
ctggggaaattgcttcactgtcttagaaccaagcaagattcacctgtgttttgtgttcatgttcatttgcctcttaaaggcaagggttgaagataaataaggtagcaatgtctatagttttggccttaactatgccaatctaattataattccctgtatttaaaatggtttcttttacttattgaaaggcattttagtgtggtttatgtgtaatattaaagattattcaacacctctcacatcttacagatctataaggtcacatgcttttaaaatagtagcaagttaaacttcactcttgaattctttacaatctaagtcaaactaagttataatttaggattgtctttaaacagccattcagaaacaaaactgtagaactgtgtatttgattgggaatggtgcttttgccaacttaa

SEQ ID NO: 594 - DNA, 491 bp, Homo sapiens
tgtcctgcccaagtgggctgcagactgagtgctgcccttgtagcttccccagaccccaactcactgcagttcatctgaacaacctgagctcctgggccggggtggaaggagggggataaacctaaggccctgatccaaagcagcctgttgagctggttctccagggctgcagtctctccaggtgtacagctgtccctgccctgtcctgtccttgcacagtctcctatgtctgagccccagtgccttctgttcgggccctcctttggtgggaaaggcagagccctgacccttgaatggttgtccttgactctgtgctgctgccttctgcagagaggcacctaagctgtttaaagagcccagtgattgtggctgctcctcctagaggtgggagggggcaagaggcctccttggtcagtgtccatgctttctgggcagggacttggttttttgttccaacagtggccttctccgggcttcatagttctttgtaa

SEQ ID NO: 595 - DNA, 233 bp, Homo sapiens
ggaatggactcataccattggcacattaggctaatcctggttttatgtgaagtcagcaattaagtgttcccactagaactgacctaagccactgattaatatttaatgagggaaggtaggggagaatctagccattttataatgccagaaatctatatatgttatctgatgccatttttctgaagtagcctcacatgtggtccccctgcagttcagcagttaacagatgactt

SEQ ID NO: 596 - DNA, 530 bp, Homo sapiens
tgaccattgctggctatttgcttacctagtaagaattggattcatttttgaccagattattcttctatgcttttttgcaataaatcaaatcccacatatctacaagtggtatgaagtcctgcaccccccaggaggcctgtccaggcatgtcttcagaggcagggtgggttacactcatttacctcccctctccccaccaaattatgacacaaacgagtatgtttcctctctagaaccctgtaatgcctcctcccccatccccagagctccttactgtaggtcttaccctggacaaggattttttcaagttggaggcacagaacatgagcaatctgacattcccacagcccctcaaacatgcaaggctactaaggcaggaggagtataaatgatggatattgaccaagacctgcttggacggagaccgccatattatctgttctcttcgttcacaaaacagccttcacttgtctcagaatttgatggacacatactgtgatgagcaggagcttcagatgcactctttacac

SEQ ID NO: 597 - DNA, 529 bp, Homo sapiens
gatagtggaacttctcgagctgcaggcccacgtacggggcgaacggctgcgcggtaccactttgaggatgttggtggcgtgcagggggctagggctgtccatgtggagtctgttcagcctctcagtttggagaactggcctgaggggccgctgtcaagaagcctgggtcctctctggcaagcagcagatagctaaggaaaaccagcaggtagcaaaggacgtgacacttcatcaggccttgctgaggctgccccagtaccagactgatctcttgcttaccttcaatcagcccccccctgacaacaggtcatctcttggccccgaaaatctgtcacctgcaccctggagcctgggtgactttgaacagctggtgaccagtctgacccttcacgatcctaacatctttggtccccagtaaaggcgctgaagcactgcatgatgttgctgagaacttggggactcggttctgtgagggggaaaagaggttgaaaagagggtttcctcttatttcttccctgtgcgtaaacat

SEQ ID NO: 598 - DNA, 444 bp, Homo sapiens
  misc_feature (303)..(303): n is a, c, g, or t
aaaagtgtgggcatattctcctcttttctacaaaggttttcaaatggttcctgaggttttttgttgttgtccgtgttgttactgttgttcttgtcatcaggtttgattttggtccttgccctttccttctagttctccttttattaataggaaggcaggcaaaagccccatttatgtgtgtgttttcccctcagacagctttcatccactgctctgcactagaattgcacaaatcttcatggtgagcaattttaagaaatgttagtgaaaggtagaaattatttcacaaatcagtttctctgntccttcatattaataataatatttggcttcccattgctctttggagttgtttattaaatatgtgtttttgacaacctcctcattagtttcttaaatgagtactggtttgtaaagaattatcaacattatccattccattta

SEQ ID NO: 599 - DNA, 407 bp, Homo sapiens
ccccaggtgtcggtgtattcaggaaacctcctgtctttctcaaggtaggttagcgaaaagcaaagagcaagggccccaaaggcctggcaggcttgcctcagacttgagaagtacaggcttgtgtatgtgtgtctgacggaagggctgacactgtcatggcctgctctgttgcagaagggggatgaagtccagtgtgagattgaagaactaggtgtcatcatcaacaaggtggtgtgatggctcctgcacaggccctgcacataggatgagggcatctgctcccactcagcctagcccagggaaaggcccagtgacaggtgtggacaggtgccagccctgcaagccgcctcttctcggtagaagggagaaggacagagctctcttcaataaattcgtcaggtcaaagc

SEQ ID NO: 600 - DNA, 539 bp, Homo sapiens
tgaagcatgttgcatactaccctggtgggatggatggttctgtaaatgaagggatatttaaacttgctactgttgttcaacaccattaatggtcagtgtgaaccattacaaagaatgtggcaacttgcttgtgcctaaaaggaggaattggaactagaatgtgtgactctgtggggactgcataggtttgttaattgacctatagctaaaccttaatgtgtttgtgtgtctatacattgctttccgcatttcaagacatccagacgctattaccaacattttcctgtgcattaacctctgcatgtgaaaacttttaacagttactgaactatgtaaatatgtgaatttttttatttaggtggatgcattttttgtctgtttactgctcttctcagctttattcaataaacttgcattttaagggttgtattggcaattttaacttaaaatgtgcatcatgatggaaggtgcagacttttttggaagtttccgagaggagggtctatagaccatttgtcagaaatcagatcagccctcaa

SEQ ID NO: 601 - DNA, 511 bp, Homo sapiens
gaagcagtagggacttgcacaaagccctttgggaagcaggctgggaaacagtggagggagggtgtccattagccccaaggagacacaggatctgggctctgtctttcgccttcctcccagaatacgctgccatcaactccatgctggaccagatcaactcctgtctggaccacctggaggagaagaatgaccacctccacgcccgcctccaggagctgctggagtccaaccggcagacacgcctggagttccagcagcagctcggggaggcccccagtgatgccagcccctaggctccaagagcccccaaccgggacccaaccctgcctccctgggctaggctctggcctgggcactcaccccctggcttagacaccttctcaagggctggccttcagggacccctggtgggtctgcctgcctgggccacccttcctgcctgggcctccccttggcctacctgggccagcccccaccacctggcatgccctcctggggccaagagtgggcc

SEQ ID NO: 602 - DNA, 511 bp, Homo sapiens
gtgctcctggacattcattccagagaaatgaaaacctatattgtacttgtactcaaatattcataggagctttatttgtaatagccccaaactggaaacaacccagatgtcctacaacaggtacatggttaaacaaaccatccataacttggaatactgctctggaatgaaaaggaactaactgttgatacaagaacttggttgtacctcaggggtattatggtgaacaaaaaaaaaaccagtctcaaatggtcacatactgtatgatcgcatttatataacattcttgaggtgacaaaattattgaaatgaagaacagattaatggttgccagggatagggactggagggggtgtggggtatgtatgactataaagggatgacgcaaggagttcctttgtgctgatggaacagttctatatgattatgatgattacgatgttgattataacatttgattatgaggttaagcacatgaatctttacctgtgctgaagttgtatggacctac

SEQ ID NO: 603 - DNA, 507 bp, Homo sapiens
ccaaaagctgctttccatggcacactgccctctgccactgacaggaaagtggatgccatagtttgaattcatgcctcaagtcggtgggcctgcctacgtgctgcccgagggcaggggccgtgcagggccagtcatggctgtcccctgcaagtggacgtgggctccagggactggagtgtaatgctcggtgggagccgtcagcctgtgaactgccaggcagctgcagttagcacagaggatggcttccccattgccttctggggagggacacagaggacggcttccccatcgccttctggccgctgcagtcagcacagagagcggcttccccattgccttctggggagggacacagaggacagtttccccatcgccttctggttgttgaagacagcacagagagcggcttccccatcgccttctggggaggggctccgtgtagcaacccaggtgttgtccgtgtctgttgaccaatctctattcagcatcgtgtgggtccctaagcac

SEQ ID NO: 604 - DNA, 471 bp, Homo sapiens
gttttgggtatgtttaatctgttatgtactagtgttctgtttgttattgttttgttaattacaccataatgctaatttaaagagactccaaatctcaatgaagccagctcacagtgctgtgtgccccggtcatctagcaagctgccgaaccaaaagaatttgcaccccgctgcgggcccacgtggttggggccctgccctggcagggtcatcctgtgctcggaggccatctcgggcacaggcccaccccgccccacccctccagaacacggctcacgcttacctcaaccatcctggctgcggcgtctgtctgaaccacgcgggggccttgagggacgctttgtctgtcgtgatggggcaagggcacaagtcctggatgttgtgtgtatcgagaggccaaaggctggtggcaagtgcacggggcacagcggagtctgtcctgtgacgcgcaagtctgagggtctgggcggcg

SEQ ID NO: 605 - DNA, 316 bp, Homo sapiens
cctctgtcctcaaatgtccaaaatgttggaggacctctgttcatatcccacgcctgggctcttgccagcagtggagttactgtagagggatgtcccaagcttgttttccaatcagtgttaagctgtttgaaactctcctgtgtctgtgttttgtttgtgcgtgtgtgtgagagcacatcagtgtgtgcaggctgtgtttccccatttctctcctcccttcagacccatcattgagaacaaatgtaagaaatcccttcccaccaccctccctgcctcccaggccctctgcgggggaaacaagatcacccagcatcct

SEQ ID NO: 606 - DNA, 560 bp, Homo sapiens
ggcggaggagaacaaacagatcatccgcaaacacgcgcagaccttcgttgccctctgtgccacagatgtgaagttcatttccaatccgccctccatggtggcagcggggagcgtggtggccgcagtgcaaggcctgaacctgaggagccccaacaacttcctgtcctactaccgcctcacacgcttcctctccagagtgatcaagtgtgacccggactgcctccgggcctgccaggagcagatcgaagccctgctggagtcaagcctgcgccaggcccagcagaacatggaccccaaggccgccgaggaggaggaagaggaggaggaggaggtggacctggcttgcacacccaccgacgtgcgggacgtggacatctgagggcgccaggcaggcgggcgccaccgccacccgcagcgagggcggagccggccccaggtgctcccctgacagtccctcctctccggagcattttgataccagaagggaaagcttcattctccttgttgttggttgttttttcctttgctctttcccccttccatctctgacttaagcaaaa

SEQ ID NO: 607 - DNA, 385 bp, Homo sapiens
cagggtccctgtgttggaattctccctggggaacctactttctgctcagtgaggctccggccagaaacctggagtccttatcctcccctctgtaagtgttttagggtctggcttttgcaggcaccctctgacctcagcagagctcctgggcctgctgcctgtacaccacatcgcctacctacaatgccaaagcctcagtgtcaccctttctgccttggtttccctagctgagccacgctgcccatgcagcagagggcagaaggcttgcacttgggccaaagggcctaaggtccactggacagttgggaaaacacctgaccaccatttaaggactctaagccagaatggaaaattcaccaggactccattcttaagcctatgcgag

SEQ ID NO: 608 - DNA, 484 bp, Homo sapiens
  misc_feature (432)..(432): n is a, c, g, or t
  misc_feature (438)..(439): n is a, c, g, or t
gttgtgagtttagtttctctcctaaaatgaatgtatgcccaccagagcagacatcttccacgtggagaagctgcagctctggaaagagggtttaagatgctaggatgaggcaggcccagtcctcctccagaaaataagacaggccacaggagggcagagtggagtggaaatacccctaagttggaaccaagaattgcaggcatatgggatgtaagatgttctttcctatatatggtttccaaagggtgcccctatgatccattgtccccactgcccacaaatggctgacaaatatttattgggcacctactatgtgccaggcactgtgtaggtgctgaaaagtggccaagggccacccccgctgatgactccttgcattccctcccctcacaacaaagaactccactgtggggatgaagcgcttcttctagnccactnntatcgctatttaagaaccctaaatctgtcacccataataaagctg

SEQ ID NO: 609 - DNA, 453 bp, Homo sapiens
aagcttctactcctgcagtaagcacagatcgcactgcctcaataacttggtattgagcacgtattttgcaaaagctacttttcctagttttcagtattactttcatgttttaaaaatccctttaatttcttgcttgaaaatcccatgaacattaaagagccagaaatattttcctttgttatgtacggatatatatatatatatagtcttccaagatagaagtttactttttcctcttctggttttggaaaatttccagataagacatgtcaccattaattctcaacgactgctctattttgttgtacggtaatagttatcaccttctaaattactatgtaatttactcacttattatgtttattgtcttgtatcctttctctggagtgtaagcacaatgaagacaggaattttgtatatttttaaccaatgcaacatactctcagcacctaa

SEQ ID NO: 610 - DNA, 439 bp, Homo sapiens
taacaaagaacgagcacttcctttcagagtttctgagataatgtacgtggaacagtctgggtggaatggggctgaaaccatgtgcaagtctgtgtcttgtcagtccaagaagtgacaccgagatgttaattttagggacccgtgccttgtttcctagcccacaagaatgcaaacatcaaacagatactcgctagcctcatttaaattgattaaaggaggagtgcatctttggccgacagtggtgtaactgtatgtgtgtgtgtgtgtgtgtgtgtgtgtgtgggtgtatgtgtgttttgtgcataactatttaaggaaactggaattttaaagttacttttatacaaaccaagaatatatgctacagatataagacagacatggtttggtcctatatttctagtcatgatgaatgtattttgtataccatcttcatata

SEQ ID NO: 611 - DNA, 469 bp, Homo sapiens
  misc_feature (93)..(94): n is a, c, g, or t
aagatgcaaatcaactctctcctggtcgctttgccatcaagaaacattcagaccagggaacggaaagaagagagaccgagctaattaactaanncatgttcattcagcgtgcttggtccgacatgccttgaaaccagaaatctaatctctgtttaggtgcctctacttgggagcgggaagaggagatgacaggaagcgacgcctctggcagggcccttgctgcagagttggtggagaacagaaatccacgctcaatctcaggtcttcacgcggggggtgggggtcagatgcactgaagtagccaacagcgaagccagtccagaagaggggtccgctgggagggagggttgtgtcaggcttgggggatgggctcttcgccatgggggtctttgaacacacctctctcctttccttttgtctacggaagcctctgggtgacaaaagtaaaagagagctgcccacaacttgc

SEQ ID NO: 612 - DNA, 493 bp, Homo sapiens
  misc_feature (273)..(273): n is a, c, g, or t
  misc_feature (408)..(408): n is a, c, g, or t
  misc_feature (410)..(410): n is a, c, g, or t
gaggggctgttgaatttcccacataccctccttccaccaagttggaacatccttggaaattggaagagcacaagaggagatccagggcaaggccattgggatattctgaaacttgaatattttgttttgtgcagagataaagaccttttccatgcaccctcatacacagaaaccaattttcttttttatactcaatcatttctagcgcatggcctggttagaggctggttttttctcttttcctttggtccttcaaaggcttgtagttttggntagtccttgttctttggaaatacacagtgctgaccagacagcctccccctgtcccctctatgacctcgccctccacaaatgggaaaaccagactacttgggagcaccgcctgtgaaataccaacctgaagacacngnttcattcaggcaacgcacaaaacagaaaatgaaggtggaacaagcacagatgttcttcaactgtttttgtctacactctttct

SEQ ID NO: 613 - DNA, 395 bp, Homo sapiens
ggagcagcctcgaaactgtgacgatgaagtgtacgagctgatgcgtcagtgctggcgggaccgtccctatgagcgacccccctttgcccagattgcgctacagctaggccgcatgctggaagccaggaaggcctatgtgaacatgtcgctgtttgagaacttcacttacgcgggcattgatgccacagctgaggaggcctgagctgccatccagccagaacgtggctctgctggccggagcaaactctgctgtctaacctgtgaccagtctgacccttacagcctctgacttaagctgcctcaaggaatttttttaacttaagggagaaaaaaagggatctggggatggggtgggcttaggggaactgggttcccatgctttgtaggtgtctcat

SEQ ID NO: 614 - DNA, 336 bp, Homo sapiens
aacagcgtcaaatcatcttttcatgatcccaagctgaaaggcaagccctccagagagcgttatgtgacccacaaccgagcacattggtgacagacttcggggcctgtctgaagccatagcctccacggagagccctgtggccgactctgcactctccaccctggctgggatcagagcaggagcatcctctgctggttcctgactggcaaaggaccagcgtcctcgttcaaaacattccaagaaaggttaaggagttcccccaaccatcttcactggcttccatcagtggtaactgctttggtctcttctttcatctggggatgacaatggacctct

SEQ ID NO: 615 - DNA, 557 bp, Homo sapiens
gcacgtcgcacacagacatggggaacttggcatgacgtcacaccgagatgcagcaacgacgtcacgggccatgtcgacgtcacacatattaatgtcacacagacgcggcgatggcatcacacagacggtgatgatgtcacacacagacacagtgacaacacacaccatgacaacgacacctatagatatggcaccaacatcacatgcacgcatgccctttcacacacactttctacccaattctcacctagtgtcacgttcccccgaccctggcacacgggccaaggtacccacaggatcccatcccctcccgcacagccctgggccccagcacctcccctcctccagcctcctggcctcccagccacttcctcacccccagtgcctggacccggaggtgagaacaggaagccattcacctccgctccttgagcgtgagtgtttccaggaccccctcggggccctgagccgggggtgagggtcacctgttgtcgggaggggagccactccttctcccccaactcccagccctgcctgtggcccgttgaaatgttggt

SEQ ID NO: 616 - DNA, 566 bp, Homo sapiens
gatactcacttctgcaaggtcaatgagagaggagagtacttctgggagaagagggtcacaggctgcccaccctttgatgaacacaagtgtctggctgagggaggtaaaattatgaaaattccaggcacctgctgtgacacatgtgaggagcctgagtgcaacgacatcactgccaggctgcagtatgtcaaggtgggaagctgtaagtctgaagtagaggtggatatccactactgccagggcaaatgtgccagcaaagccatgtactccattgacatcaacgatgtgcaggaccagtgctcctgctgctctccgacacggacggagcccatgcaggtggccctgcactgcaccaatggctctgttgtgtaccatgaggttctcaatgccatggagtgcaaatgctcccccaggaagtgcagcaagtgaggctgctgcagctgcatgggtgcctgctgctgcctgccttggcctgatggccaggccagagtgctgccagtcctctgcatgttctgctcttgtgcccttctgagcccacaataaaggctgagctcttatcttgctgc

SEQ ID NO: 617 - DNA, 504 bp, Homo sapiens
  misc_feature (147)..(148): n is a, c, g, or t
  misc_feature (152)..(152): n is a, c, g, or t
  misc_feature (219)..(219): n is a, c, g, or t
tctaccccaggtcagacggacagaaagacagatcacaggtacagggatgaggacaccggctctgaccaggagtttggggagcttcaggacattgctgtgctttggggattccctccacatgctgcacgcgcatctcgcccccagggnnactngcctggaagattcaggagcctgggcggccttcgcttactctcacctgcttctgagttgcccaggagnccactggcagatgtcccggcgaagagaagagacacattgttggaagaagcagcccatgacagctccccttcctgggactcgccctcatcctcttcctgctccccttcctggggtgcagcctaaaaggacctatgtcctcacaccattgaaaccactagttctgtccccccaggagacctggttgtgtgtgtgtgagtggttgaccttcctccatcccctggtccttcccttcccttcccgaggcacagagagacagggcaggatccacgtgcccattgtggaggc

SEQ ID NO: 618 - DNA, 492 bp, Homo sapiens
tgaactttctgctgtcttgggtgcattggagccttgccttgctgctctacctccaccatgccaagtggtcccaggctgcacccatggcagaaggaggagggcagaatcatcacgaagtggtgaagttcatggatgtctatcagcgcagctactgccatccaatcgagaccctggtggacatcttccaggagtaccctgatgagatcgagtacatcttcaagccatcctgtgtgcccctgatgcgatgcgggggctgctgcaatgacgagggcctggagtgtgtgcccactgaggagtccaacatcaccatgcagattatgcggatcaaacctcaccaaggccagcacataggagagatgagcttcctacagcacaacaaatgtgaatgcagaccaaagaaagatagagcaagacaagaaaatccctgtgggccttgctcagagcggagaaagcatttgtttgtacaagatccgcagacgtgtaaatgttcct

SEQ ID NO: 619 - DNA, 243 bp, Homo sapiens
gagcgcctccagtctagaaggcataagccaataggataatatattcagggtgcagggtgggtaggttgctctggggatgggtttatttaagggagattgcaaggaagctatttaacatggtgctgagctagccaggactgatggagcccctgggggtgtgggatggaggagggtctgcagccagttcattcccagggccccatcttgatgggccaagggctaaacatgcatgtgtcagtggct

SEQ ID NO: 620 - DNA, 412 bp, Homo sapiens
  misc_feature (52)..(52): n is a, c, g, or t
  misc_feature (115)..(116): n is a, c, g, or t
  misc_feature (282)..(282): n is a, c, g, or t
  misc_feature (292)..(292): n is a, c, g, or t
  misc_feature (302)..(302): n is a, c, g, or t
agcacagggcaccaactggacagaggcctccggtcagcctcactctgactgnaaccccctctcactggacagcatcacctggacacagagcctcacctagtctgtgtcccatggnncacaactttgctttggacagtgacaccaagaatactcacccctttacttagccagaccacaggcagccacctggacacaaacatctctccagagtcagcctccacacagactccacagcagaactcccagggaggcactggggcatggcttcagagcaccaggcangcgctccgcngtgcctagcncccgctcagccagggcagcctgcagcggagcttggagccagcagcttctcatctcttggcctcgggaaatgtagctggagtcatcatttagcagagcacggtgtccctgg

SEQ ID NO: 621 - DNA, 322 bp, Homo sapiens
aactgatttgtattctgtggcatgtaaaagcggaaagttagtgcttgttctaagatgcctcctgttgataaaccataaatgaatcatcaaagctcacaccaaatttttctatcaaataaaactagtgacagcttgtggactttttattagagctcgccacgaactagggtaaggtgagtgtcttagcatattttaatgcagttgcttactaaaggttttaaccgcacacacacacgcatttcttatgcaatctatgtttcgacttgtgctttcagttagccttctgtaggaagtagaagtcatatgttgtctttgttgtagt

SEQ ID NO: 622 - DNA, 279 bp, Homo sapiens
agtgcaggggggctgcatgcgttgcctcctgagatcgaggctgcaggatatgctcagactctagaggcgtggaccaaggggcatggagcttcactccttgctggccagggagttggggactcagagggaccacttggggccagccagactggcctcaatggcggactcagtcacattgactgacggggaccagggcttgtgtgggtcgagagcgccctcatggtgctggtgctgttgtgtgtaggtcccctggggacacaagcaggcgccaatggtatc

SEQ ID NO: 623 - DNA, 347 bp, Homo sapiens
tcagctctggagaacagtggttgcctgggggcttttgccactccttgtcccccgtgatctcccctcacactttgccatttgcttgtactgggacattgttctttccggccaaggtgccaccaccctgccccccctaagagacacatacagagtgggccccgggctggagaaagagctgcctggatgagaaacagctcagccagtggggatgaggtcaccaggggaggagcctgtgcgtcccagctgaaggcagtggcaggggagcaggttccccaagggccctggcacccccacaagctgtccctgcagggccatctgactgccaagccagattctcttgaataaag

SEQ ID NO: 624 - DNA, 549 bp, Homo sapiens
aggacccaccagatgctaagatgctacagatggtgcttcagggctctgtagggcccaccgtgaaccagggtcccctggaggtggcccaggtgtttttagcagagatcccggaagaccccaagctcttccggcatcacaacaaattgcggctctgcttcaaggacttctgcaagaaatgtgaggatgcgctgcggaaaaataaggccctgattgggccggaccagaaggagtaccaccgtgagctggagcgcaactactgccgcctgcgggaggctctgcagcccctgcttacccagcgcctgccccagctgatggcacccaccccacccggcctcaggaactccttgaacagagcaagtttccgaaaggcagacctctgagcccacaaggaccaaagctgtacctagaggaaccagcacccgggcctcagctgtctgtgctgcgaggggagtctgccctggtgcccactgggctgtggggtgaccacactgtacttggggctgggccctctgcccctgtgtccccatctgtgtgcactgatgcttcctc

SEQ ID NO: 625 - DNA, 523 bp, Homo sapiens
aatgactcatcaaattatccaattattaactactagacaaaaagtattttaaatcagtttttctgtttatgctataggaactgtagataataaggtaaaattatgtatcatatagatatactatgtttttctatgtgaaatagttctgtcaaaaatagtattgcagatatttggaaagtaattggtttctcaggagtgatatcactgcacccaaggaaagattttctttctaacacgagaagtatatgaatgtcctgaaggaaaccactggcttgatatttctgtgactcgtgttgcctttgaaactagtcccctaccacctcggtaatgagctccattacagaaagtggaacataagagaatgaaggggcagaatatcaaacagtgaaaagggaatgataagatgtattttgaatgaactgttttttctgtagactagctgagaaattgttgacataaaataaagaattgaagaaacacattttaccattttgtgaattgttctgaacttaaatgtccacta

SEQ ID NO: 626 - DNA, 543 bp, Homo sapiens
catgactgcatgacggagccgagcatgtgtctttacacctcgctgttgtcacatctcagggaactgaccctcaggcacaccttgcagaaggaaggccctgccctgcccaacctctgtggtcacccatgcatcattccactggaacgtttcactgcaaacacaccttggagaagtggcatcagtcaacagagaggggcagggaaggagacaccaagctcacccttcgtcatggaccgaggttcccactctggcaaagcccctcacactgcaagggattgtagataacactgacttgtttgttttaaccaataactagcttcttataatgatttttttactaatgatacttacaagtttctagctctcacagacatatagaataagggtttttgcataataagcaggttgttatttaggttaacaatattaattcaggttttttagttggaaaaacaattcctgtaaccttctattttctataattgtagtaattgctctacagataatgtctatatattggccaaactggtgcatgacaagtac

SEQ ID NO: 627 - DNA, 463 bp, Homo sapiens
gtttaagtgcttctctgttaggttctggggcttgcaatcatttgaattgttctgtttcacaataaaggagattcactgggttctgcattttcaggattcaatagaactgctccattaaaaaaataatccttagcaagcattcgaatcctaactgctttgatgcacttgccctcgggcacctgtcatttccaatatggtaggtgtcaaagtcaaaagtatttactgggagaaaaaagagaggagtggttgtagaagtctccctaaatcagacatgtcaagcaatcagccaacgtggtgtatttctcattcaatattttagtgtgaattgagacactgagataaagacatcgtgcagagataaatggggatacagttaaatgtagcaactcttgagttcattttttcccactgtagcaaaattaatgctttctctttattgaaataaattgctcattcctccaaa

SEQ ID NO: 628 - DNA, 440 bp, Homo sapiens
cacattcaatccggaccattttctggagaatggacagtttaagaaaagggaagcctttatgcctttctcaataggaaagcgggcatgcctcggagaacagttggccaggactgagctgtttattttcttcacttcccttatgcaaaaatttaccttcaggcccccaaacaatgagaagctgagcctgaagtttagaatgggtatcaccatttccccagtcagtcaccgcctctgcgctgttcctcaggtgtaatattgttaagaaagaaaggggcaaggaaagcaagaagacatggcacgtgttctgaaaccactggtgtctgctcagatgtgttgggacaaaatgaaagtgactttcaagaaagatcagaggaatttgactcagagaaaactagatccaaatcccagctctactgtctctcccgaattagccttgggaa

SEQ ID NO: 629 - DNA, 530 bp, Homo sapiens
atttaaaatattgatccttcccttggaccaccttcatgttagttgggtattataaataagagatacaaccatgaatatattatgtttatacaaaatcaatctgaacacaattcataaagatttctcttttataccttcctcactggccccctccacctgcccatagtcaccaaattctgttttaaatcaatgacctaagatcaacaatgaagtattttataaatgtatttatgctgctagactgtgggtcaaatgtttccattttcaaattatttagaattcttatgagtttaaaatttgtaaatttctaaatccaatcatgtaaaatgaaactgttgctccattggagtagtctcccacctaaatatcaagatggctatatgctaaaaagagaaaatatggtcaagtctaaaatggctaattgtcctatgatgctattatcatagactaatgacatttatcttcaaaacaccaaattgtctttagaaaaattaatgtgattacaggtagaggccttctaggtgagacac

SEQ ID NO: 630 - DNA, 321 bp, Homo sapiens
attacaatcagaggtgagcactgcaacaaaaaggctgttttctctcggatctccaaatttaaaagcacaaggaatgattgtaccacacaaagtaatgtaaaacattaaaggactcattaaaaagtaacagttgtctcatatcatcttgatttattgtcactgttgctaactttcaggctcggaggagatgctcctcccaaaatgagttcggagatgatagcagtaataatgagacccccgggctccagctctgggccccccattcaggccgagggggctgctccggggggccgacttggtgcacgtttggatttggaggat

SEQ ID NO: 631 - DNA, 557 bp, Homo sapiens
gtttcttctggaatgaataccctcatatctgtcctgatgtgatatgtctgagactgaatgcgggaggttcaatgtgaagctgtgtgtggtgtcaaagtttcaggaaggattttacccttttgttcttccccctgtccccaacccactctcaccccgcaacccatcagtattttagttatttggcctctactccagtaaacctgattgggtttgttcactctctgaatgattattagccagacttcaaaattattttatagcccaaattataacatctattgtattatttagacttttaacatatagagctatttctactgatttttgcccttgttctgtcctttttttcaaaaaagaaaatgtgttttttgtttggtaccatagtgtgaaatgctgggaacaatgactataagacatgctatggcacatatatttatagtctgtttatgtagaaacaaatgtaatatattaaagccttatatataatgaactttgtactattcacattttgtatcagtattatgtagcataacaaaggtcataatgctttcagcaat

SEQ ID NO: 632 - DNA, 397 bp, Homo sapiens
caggtgcaccactgaagtgaggacacaccggagccaggcgcctgctcatgttgaagtgcgctgttcacacccgctccggagagcaccccagcagcatccagaagcagctgcagtgcaagcttgcatgcctgcgtgttgctgcaccaccctcctgtctgcctcttcaaagtctcctgtgacattttttctttggtcagaggccaggaactgtgtcattccttaaagatacgtgccggggccaggtgtggctcacgcctgtaatcccagcactttgggaggccgaggcggcggatcacaaagtcagacgagaccatcctggctaacacggtgaaaccctgtctctactaaaaatacaaaaaaaaattagctaggcgtagtggttggcacctatagtccc

SEQ ID NO: 633 - DNA, 265 bp, Homo sapiens
  misc_feature (74)..(75): n is a, c, g, or t
  misc_feature (79)..(79): n is a, c, g, or t
  misc_feature (126)..(126): n is a, c, g, or t
gtgtggtgtttgtgtcttaactatgcactgggcccttgtctgcgtcggcttgcatacagagggcccctggggtnngccntccggcctggcctcagccagtgggatggacagggccaggcaggcctntgaacttccacctcctggggcctcccagacctcctgtgcccccacctgtgtgggcaggtgggccagtcttcgggtgatgggaccaaaccccttcagttcagtagagaaaggctaggtcctctacaaagagctgcaagac

SEQ ID NO: 634 - DNA, 446 bp, Homo sapiens
aagagggcccagcaaggtaatttatggttgagctgatgtcaattggttcttgtcttgagtcgactcaatttagcccaagtgctgaaacaagaaatgtcatttttttcatcaaagacaccagggcagatttttaagtaaagaaagacaattggacccttaagaatttatgcatttgtaaagttgctgttgatccaaatattttcaagccatgtaatccattggttttgtgggcagtttaataaacctgaacctttgtgtgttttctaattgtacctgagttgaccatcctttctttttatagtatatttcttgtatgatattttgtaaagctctcacctggttcttttatggggacttttcgtttttgggcaactccagtgtatttatgtgaaactttataagagaattaatttttccatttgcatattaatatgttcctccacaca

SEQ ID NO: 635 - DNA, 475 bp, Homo sapiens
agccgccatgtctggccagataaattaagtcaaacatttggtttccagaaaataaagacaaatagagaaggttagatttttttttttccaacaagtggataaaagtctgtgactcgggggaaagtggaaggagaaatgcagccgatatagagtcattatgtttgcaaagcccctggtcatacaggccagggaacataagaccgcaattctaagtttctagataaacagcgatctccaagtcaagactgaggatgaagagggagaatgtcagaactcaagtgaagggcaatcagggcagactgcctggaggagtgatgccagaaggtttgggaagaaggtgtgggacaagaagaaagggtatttattcattcattcaacagaggtttatgtagggcactgtgctgggtggggctggggacacaacaatgactgaggcagcctggccttgccttcacagggctcaccatacacaagt

SEQ ID NO: 636 - DNA, 482 bp, Homo sapiens
ctgcagatctcccaacttgaactataatccaccagccagcctcagccttgagctttggaaccacattagatcctgcatctgggtgaagaaacgggagctgtggaccacaggccagccagtgaacctcctgggctttcttgcctttgtcctgatcctctcacagaaacactgggccaaacagtggggagagattggagagcgggtgtggctgcccaaccccatccagagcatctgcttccagatgagccagtgcctcgcatgataccagaggaggcgagggacagagacagcaaggcagacagtggctggcaggggggcccaggcccgggacgaggcctccccttcagctcaggcacagcaacttgcccaggactgacactgtcaccctgactgcaggaggcacagggactccgggagactcagagggcgaagagcactggcatttggcatgtccatgacattggagactcccctagcagggt

SEQ ID NO: 637 - DNA, 532 bp, Homo sapiens
cccgctactgcttacacaggccgggttcccacgcagaggggaggctgctccacccctactctcctcccttgctcccagcagcggaagcgcctctgacccttggcttgagtcccacgtgggggaggaggaggcaggcagcaccagcaggggtccaccaagagcccagaccagcccctctgccctcctacccgggcctcgaagggtgtggcacaggctacgtgttgagcgtggcctacgtgagccaacaagaagcaggggcctctgagtgccaagcgacgtggcgggctccacgttagcccagctctgagatgccagcccaggggcggcgctgctcagcttgggctggtccagggcctgcccaggctggggcacctttgcctcctgagggcagcgcactcctcccctgccaagcctactgcctcccgtgccgccagtaccccctccagccccacacctggcctcccccgccactcccctcccttgctcccctctgtccccaggggatcaaacagaagccagccgtgggcaaaat

SEQ ID NO: 638 - DNA, 450 bp, Homo sapiens
caccagtgcagcctcaggcatgaaagtgcaaggggacccaggtggaaagacggggactgagggcaagagcagaggcagcagcagcagcagcaggtgcctgtgaacatacctcagacgcctctggatccaagaaccaggggcctgaggatctgtggacaagagctggtttctaaaatcttgtaactcactagctagcggcggcctgagaactttagggtgactgatgctacccccacagaggaggcaagagccccaggactaacagctgactgaccaaagcagccccttgtaagcagctctgagtcttttggaggacagggacggtttgtggctgagataagtgtttcctggcaaaacatatgtggagcacaaagggtcagtcctctggcagaacagatgccacggagtatcacaggcaggaaagggtggccttcttgggtagcaggagtc

SEQ ID NO: 639 - DNA, 551 bp, Homo sapiens
tatacagtttaataagcctcttgcaagttacttgttctctcacctgaggtatttttttcctccccaccttgcccctgttcctcccttcctcttctccctttgcaagaggaaatatttaacatatttgggtccaacttcaataatgtaataattaatacattaaaagcatttaacttcctttctagaaaaatgcacaggctaaggcatagacaaaacaaagagaaatgctgagaaatttgccactggagacaagcaatctgaataaatatttgccaaaagttctttttatgtcatatagtgtcaggatttgaaggagctattttttttaatgttgcaactagcaactcatcttcggaagacacagccaggagaatgaagtagaagtgaaaggtttataaatccatttgtaagcatttatcccatatattttaaattcaagaaaaattgtgtttatctttagaattttgtattcaatactttatgtactatgtgactcatgcttctggataaataaagcaccaaatatgtatctgtaaccacaatcacacata

SEQ ID NO: 640 - DNA, 475 bp, Homo sapiens
acatgaccctaggaccagcagtctgagagggtaggtaccagaagacccagaaactcttatcgtggcactgttgcagcttcctctgccctggctggaaagactccagaatccagtgtggtgctgtggaaggagcactggactaaaggcttcagtggctgcgtgtcccaggacaggtcatggcccctctctgggcccagcccatttatctataccatgaggtaactgaagtaaggagagcagtgaatgtcaaactgtgtttcttagagccataagccccacatattatccctgaacaagggcagctcctgctttatatatttgatacgtaggggttccatgagagattttgggttttaaaggaatggttttactgcattaaagaaaaaaaatgctttggaaaccagaggcctgggtgatgttaaagtctatcctgtcccacttcctacattctgggactaccgtgaagcctggagta

SEQ ID NO: 641 - DNA, 189 bp, Homo sapiens
  misc_feature (75)..(75): n is a, c, g, or t
attgcttgctaaagaagtggtctcctgaggtcttaagacattcctgacagtgtcttgagtgggtgggagagaggntgctgtcattgcgctgtggaatttcacagatgagaaccacgcctagccaaaatcacttttcctgtttgcctcagtgacacagctgcagggaccctcgtggatgttgtattaaat

SEQ ID NO: 642 - DNA, 548 bp, Homo sapiens
gagagcaaagggtgtctgcgtcgtcaccaaatcgtagcgtttgttaccagaggttgtgcactgtttacagaatcttccttttattcctcactcgggtttctctgtggctccaggccaaagtgccggtgagacccatggctgtgttggtgtggcccatggctgttggtgggacccgtggctgatggtgtggcctgtggctgtcggtgggactcgtggctgtcaatgggacctgtggctgtcggtgggacctacggtggtcggtgggaccctggttattgatgtggccctggctgccggcacggcccgtggctgttgacgcacctgtggttgttagtggggcctgaggtcatcggcgtggcccaaggccggcaggtcaacctcgcgcttgctggccagtccaccctgcctgccgtctgtgcttcctcctgcccagaacgcccgctccagcgatctctccactgtgctttcagaagtgcccttcctgctgcgaagttctcccatcctgggacggcggcagtattgaagctcgtgacaagtgccttcacaca

SEQ ID NO: 643 - DNA, 525 bp, Homo sapiens
tgggggaatgaggcttgcgttgttcgggcgtctgctggccctgagacatccagtcttccacactcaactgtgggatgggagggtggcgtggctttaccccatggaggctgttccagggctctgggcacacagctgtgctcacacaaaatactgggtggcttggtttagagctaattgtagtggaagcctgcaaggttgaggggtgaaggggagggggcttgcaaggtccaggtaaagatctggaaagacagaacgtacagcttggagggcaagggggactctaaagtgcaaggagatttacagttgggaaaggaggcagtggcagaggggttgagggacaggggcccttaagtccagcgaggaaagctcggtgtggggcccgctctacgctccgtttggggtgacctggaacgcctcttctcccagctccctccagccatcagcagcctcttgtcaagcttctgcctcgccccagtctatccccaaccccaaatcaagaccacctttcttcaacggtcactattt

SEQ ID NO: 644 - DNA, 549 bp, Homo sapiens
tgttagtgcaagtcatcttccctacccatatttatcatcctcttgaggaaagaaatctagtattatttgttgaaaatggttagaataaaaacctatgactctataaggttttcaaacatctgaggcatgataaatttattatccataattataggagtcactctggatttcaaaaaatgtcaaaaaatgagcaacagagggaccttatttaaacataagtgctgtgacttcggtgaattttcaatttaaggtatgaaaataagtttttaggaggtttgtaaaagaagaatcaattttcagcagaaaacatgtcaactttaaaatataggtggaattaggagtatatttgaaagaatcttagcacaaacaggactgttgtactagatgttcttaggaaatatctcagaagtattttatttgaagtgaagaacttatttaagaattatttcagtatttacctgtattttattcttgaagttggccaacagagttgtgaatgtgtgtggaaggcctttgaatgtaaagctgcataagctgttaggttttgtt

SEQ ID NO: 645 - DNA, 512 bp, Homo sapiens
gtggccttgaattttaactctgtatgcttaatgtttacaatatgaagttattagttcttagaatgcagaatgtatgtaataaaataagcttggcctagcatggcaaatcagatttatacaggagtctgcatttgcactttttttagtgactaaagttgcttaatgaaaacatgtgctgaatgttgtggattttgtgttataatttactttgtccaggaacttgtgcaagggagagccaaggaaataggatgtttggcacccaaatggcgtcagcctctccaggtccttcttgcctcccctcctgtcttttatttctagccccttttggaacaggaaggaccccggggtttcaattggagcctccatatttatgcctggaaggaaagaggcctatgaagctggggttgtcattgagaaattctagttcagcacctggtcacaaatcacccttaattctgctatgattaaaatacatttgttgaacagtgaacaagctaccactcgtaaggcaa

SEQ ID NO: 646 - DNA, 518 bp, Homo sapiens
cggtataagtcctggagcgttccctgtgggccttgctcagagcggagaaagcatttgtttgtacaagatccgcagacgtgtaaatgttcctgcaaaaacacagactcgcgttgcaaggcgaggcagcttgagttaaacgaacgtacttgcagatgtgacaagccgaggcggtgagccgggcaggaggaaggagcctccctcagggtttcgggaaccagatctctcaccaggaaagactgatacagaacgatcgatacagaaaccacgctgccgccaccacaccatcaccatcgacagaacagtccttaatccagaaacctgaaatgaaggaagaggagactctgcgcagagcactttgggtccggagggcgagactccggcggaagcattcccgggcgggtgacccagcacggtccctcttggaattggattcgccattttatttttcttgctgctaaatcaccgagcccggaagattagagagttttatttctgggattcctgtagacacacccacc

SEQ ID NO: 647 - DNA, 524 bp, Homo sapiens
ggcttatgggacgatgacctacctaacaagagcagtggcttcttatttgcaggaattgttgcccaattcgggctgccagatgcaatagggtctcacctggaaacatgatcacactctcaatctgtcacgtgccccctagccttactgggaaccttctgtcccccaagatcccctgtgctatcaggaaagcatgtcccatcagaaacactctcggggggcaatggtagcactcaccctgaaactgatgtatgttaaagccacagagatagagctgaggagtcctgtgttcccccgcaaggagcaccccgggatcattttctaggttcatttctctggaacatttgctgtagcatctggtctcacggactctgaggaggaattggaaattggtctcttttgagtgcagagggaactgagacgccagcttaaattggctcttgcagagagttacagaaatagtttcgatgagctagtgacacatcctaaagatgcaaagatcctcctggcggcagtagccttgacaa

SEQ ID NO: 648 - DNA, 482 bp, Homo sapiens
taggacctgaggacctcacttggccctgcaaggcccgcttttcagggaccagtccaccaccatctcctccacgttgagtgaagctcatcccaagcaaggagccccagtctcccgagcgggtaggagagtttcttgcagaacgtgttttttctttacacacattatggctgtaaatacctggctcctgccagcagctgagctgggtagcctctctgagctggtttcctgccccaaaggctggcttccaccatccaggtgcaccactgaagtgaggacacaccggagccaggcgcctgctcatgttgaagtgcgctgttcacacccgctccggagagcaccccagcagcatccagaagcagctgcagtgttgctgccaccaccctcctgtctcgcctcttcaaagtctcctgtgacattttttctttggtcagaagccaggaactggtgtcattccttaaaagatacgtgccggggccaggtgt

SEQ ID NO: 649 - DNA, 462 bp, Homo sapiens
gggagccctgggttggaatccagccccacctcttttatgccacaggtttggtcaagttctctcccgctcagggtagggctgtgaactccctcttacagctaagaacatgcagcttagtgaggacaagacccttctagagctttacccctaatccccccccaggagccccgaggccggcattattcctccccattacaggtgatgagcctcaaattcagagagcttaagcaacctgctcagggtcacgtctccaacaggcagtagagtcaaggtataaaccaggtctgtttttgtaccagagtcccagactaactgttggtaggaatcttgtaaccagtcatgttttcttccttgttttggccgctgggaagctcaaagtcaaattcgagacccttttttttccaattgtgctgagtctcctactagactcgcttcattctagctttctgcttttacctttac

SEQ ID NO: 650 - DNA, 486 bp, Homo sapiens
actgaattctccaacagactctaccccagctcttctctctgccactgtcactcctcagaaagctaaattaggagacacaaaagagctagaagccttcattgctgatcttgacaaaactttagcaagtatgtgaaacaagaagttctgggtcctttcatcataagggagaagcttcagaaagttccgaggacctgctaaaatcagctactagaatctgctgccagaggggacaaagacgtgcactcaaccttctaccaggccactctcaggctcaccttaaaatcagcccttgatcccatttctgggcaatttagacagtgaaactgactttgtttacctgcttgcagcatattagaacagacgatccatgctaatattgtattttctcttaaaacatagctttcctgtaatttaaagtgcttttatgaaaatatttgtaattaattatatatagttggaaatagcagtaagctttcccattataat

SEQ ID NO: 651 - DNA, 386 bp, Homo sapiens
gaacccggatgactgtcaccttgaagcgtcctgttctccttctgtgctgtcccaggaagtgtctggcgggcgtgggcagcacagctctacactgtacgattcactagggcatcctgcgagcctcactagccttctggttcatgcctttgacaagcatttttgtgccccctctgcttactgtgacagtcgatgatgaatcttgcgttgccattttctgctgtgggtaactgcgtgcagtgtcttgccttgctttctcttcttactgtcccacagcttggtttcatgttacaaacagaaaagctcgaggctcccaccccgccacatcccaacttcatttccccctcactgtagcccatttccaccccaccacaaagttgccacaggtt

SEQ ID NO: 652 - DNA, 524 bp, Homo sapiens
tggaaaaggattctctgcctcgctttgtgcgctctgagttttatcaggagttaatcaagtagtaatttagccaggctatgaaatcatcctgtgagttatttcctccataataaccctgcatttcccattaatctacatatcttcccacagcagctttgctcagtgatacccacatgggaaaaatcccaggggatgttgcttactctttttgcccacactgctttggatacttatctactgtccgaaggccttctttccccactcaattcttcctgccctgttattaattaagatatcttcagcttgtagtcagacacaatcagaatcacagaaaaatcctgcctaaggcaaagaaatataagacaagactatgatatcaatgaatgtgggttaagtaatagatttccagctaaattggtctaaaaaagaatattaagtgtggacagacctatttcaaaggagcttaattgatctcacttgttttagttctgatccagggagatcacccctctaattatttctga

SEQ ID NO: 653 - DNA, 317 bp, Homo sapiens
caaattgaccaatagctgctgctttcatattttggataagggtctgtggtcccggcgtgtgctcacgtgtgtatgcacgtgtgtgtgtccattagacacggctgatgtgtgtgcaaagtatccatgcggagttgatgctttgggaattggctcatgaaggttcttctcaagggtgcgagctcatccccctctctccttccttcttattgactgggagactgtgctctcgacagattcttcttgtgtcagaagtctagcctcaggtttctaccctcccttcacattggtggccaagggaggagcatttcatttggagt

SEQ ID NO: 654 - DNA, 395 bp, Homo sapiens
atcgactccctgagcgagcagatttccttcctggaggagcagctggggtcctgctcctgcaagaaagactcgtgactgcccagcgccccaggctggactgagcccctcacgccgccctgcagcccccatgcccctgcccaacatgctgggggtccagaagccacctcggggtgactgagcggaaggccaggcagggccttcctcctcttcctcctccccttcctcaggaggctccccagaccctggcatgggatgggctgggatcttctctgtgaatccacccctggctacccccaccctggctaccccaacggcatcccaaggccaggtgggccctcagctgagggaaggtacgagctccctgctggagcctgggacccatggcacaggccagg

SEQ ID NO: 655 - DNA, 545 bp, Homo sapiens
  misc_feature (54)..(147): n is a, c, g, or t
  misc_feature (156)..(157): n is a, c, g, or t
  misc_feature (257)..(300): n is a, c, g, or t
  misc_feature (341)..(341): n is a, c, g, or t
  misc_feature (459)..(459): n is a, c, g, or t
  misc_feature (461)..(467): n is a, c, g, or t
  misc_feature (469)..(471): n is a, c, g, or t
  misc_feature (473)..(491): n is a, c, g, or t
aaggctctgcagagatgactgggctggggaagcagatgcttgctggccatggannnnnnnnnnnnnnnnnnnnnnnnnnnnnnnnnnnnnnnnnnnnnnnnnnnnnnnnnnnnnnnnnnnnnnnnnnnnnnnnnnnnnnnnnnnnnnacagacagnntcagcatggaatgctcttggccaagggtactgggggccctctggccttttgcagctgatccagaggaacccagagccaacttaccccaacctcaccctannnnnnnnnnnnnnnnnnnnnnnnnnnnnnnnnnnnnnnnnnnnacaggaaaaggcggattgaggctgctgggtcagccttgatngcacagacagagcttgtgccggatttggccctgtcaaggggactggtgccttgttttcatcactccttcctagttctactgttcaagcttctgaaataaacaggacttgatcacaaanannnnnnnannnannnnnnnnnnnnnnnnnnngggttgggggatagagttattttgcccaggcttcctttacttcttggtcctgta

SEQ ID NO: 656 - DNA, 463 bp, Homo sapiens
aggcagatcatgcataccaggctctgccatccttccagatcccagtctcaccacacatctacaccagtgtcagctgggctgctgccccctccgccgcctgctctctctctccggtccggagccggtcgctaagcttcagcgagccccagcagccagcacctgcgatgaaatctcatctgatcgtcacttctccaccccgggcccagagtggtgccaggaaagcccgaggggaggctaagaagtgccgcaaggtgtatggcatcgagcaccgggaccagtggtgcacggcgtgccggtggaagaaggcctgccagcgctttctggactgagctgtgctgcaggttctactctgttcctggccctgccggcagccactgacaagaggccagtgtgtcaccagccctcagcagaaaccgaaagagaaagaacggaaacacggagtttgggctctgttggctaaggt

SEQ ID NO: 657 - DNA, 524 bp, Homo sapiens
  misc_feature (26)..(26): n is a, c, g, or t
  misc_feature (55)..(55): n is a, c, g, or t
  misc_feature (57)..(57): n is a, c, g, or t
  misc_feature (72)..(114): n is a, c, g, or t
  misc_feature (285)..(300): n is a, c, g, or t
  misc_feature (443)..(443): n is a, c, g, or t
  misc_feature (476)..(476): n is a, c, g, or t
  misc_feature (482)..(482): n is a, c, g, or t
gctacagatggtgcttcagggctctntagggcccaccgtgaaccagggtcccctngnaggtggcccaggtgnnnnnnnnnnnnnnnnnnnnnnnnnnnnnnnnnnnnnnnnnnnacaacaaattgcggctctgcttcaaggacttctgcaagaaatgtgaggatgcgctgcggaaaaataaggccctgattgggccggaccagaaggagtaccaccgtgagctggagcgcaactactgccgcctgcgggaggctctgcagcccctgcttacccagcgcctgcccnnnnnnnnnnnnnnnnccccacccggcctcaggaactccttgaacagagcaagtttccgaaaggcagacctctgagcccacaaggaccaaagctgtacctagaggaaccagcacccgggcctcagctgtctgtgctgcgaggggagtctgccctggtgnccactgggctgtggggtgaccacactgtacttngggctnggccctctgcccctgtgtccccatctgtgtgcactgatgctt

SEQ ID NO: 658 - DNA, 491 bp, Homo sapiens
  misc_feature (314)..(314): n is a, c, g, or t
ggcggcaatagtttcagcttcagcagcgccagcagtcttagtagcagcagcaccagtgcgggttgcgccagcagccttggcggcggcggcgcctcggagcttctccctgcaacacagcccacagccagcagcgctcccaaaagccccgagccagcccaaggcgcgcttggctgcttatagactgtactagggcggaggggatccgggccttgcgtgcagcctcccaaccatgggctgggttttgtgcttactgtatgttggcgacttggtagggcaggagacgcagcgtggagcctacctcccgacattcacgnttcgccccacgctgctccgactggctgcagcggacactgcccaaagcagaggggagtctcagtgtcctgctagccagccgaacacttctctccggaagcaggctggttcgactgtgaggtgtttgactaaactgtttctctgactcgccccagaggtcgtggctcaaaggcacttag

SEQ ID NO: 659 - DNA, 433 bp, Homo sapiens
cagtacttgcccactgacagtcaatatctgtcacctagtaagcaaccaagagaccctcccttcatggcttccgatcagatggcaagggtctttgcagatgtgcattccagagccagccgggattccagtgagatgggtgctgttcttgagcagcttgaccaccccaacagggatctgggcagagagtctgtggatgcagaggaagttgtgagagaaattgataagcttttgcaagactgccggggaaacgaccctgtggctgtgagaaagtgaaaaaagaaaaaaaaaaaaggcattggcattttcttgtctcttctgttgatttaaaaatgatccctcctggtgataacccattttacagggatgaagaaagaccaatgctgctttaaggcttttagtgaacatctgaagtgcccacaagtatgttctttcc

SEQ ID NO: 660 - DNA, 379 bp, Homo sapiens
gtccacctgaggaactgtctcgaactattttcaaagacttaagcccagtgcactgaaagtcacggctgcgcactgtgtcctcttccaccacagagggcgtgtgctcggtgctgacgggacccacatgctccagattagagcctgtaaactttatcacttaaacttgcatcacttaacggaccaaagcaagaccctaaacatccataattgtgattagacagaacacctatgcaaagatgaacccgaggctgagaatcagactgacagtttacagacgctgctgtcacaaccaagaatgttatgtgcaagtttatcagtaaataactggaaaacagaacacttatgttatacaatacagatcatcttggaactgcattct

SEQ ID NO: 661 - DNA, 527 bp, Homo sapiens
gaggcgggtgtttttgaactagaagcaattgttaacagcatcaaaagaagcagaaaaattatttttgttataacacaccatctattaaaagacccattatgcaaaagattcaaggtacatcatgcagttcaacaagctattgaacaaaatctggattccattatattggttttccttgaggagattccagattataaactgaaccatgcactctgtttgcgaagaggaatgtttaaatctcactgcatcttgaactggccagttcagaaagaacggataggtgcctttcgtcataaattgcaagtagcacttggatccaaaaactctgtacattaaatttatttaaatattcaattagcaaaggagaaactttctcaatttaaaaagttctatggcaaatttaagttttccataaaggtgttataatttgtttattcatatttgtaaatgattatattctatcacaattacatctcttctaggaaaatgtgtctccttatttcaggcctatttttgacaattgactt

SEQ ID NO: 662 - DNA, 391 bp, Homo sapiens
gtttattccagcgatgtgacttttttcagaatatttcttggaatcatattcagagtctggggctgtgtgttgagcagccttaaggatgctagacactcatttagtgcccagggagtccagcgaatgacgtctgtggccaagcgaggtctcaggtgcaaagcaaaaggaccatttaaagtaaaatagcttggattcaatcatgtgacttttaaattggctcagaaagcaattttgtaatttcagagagtgttttgagccatggccacgttgtcattgtgagtctatagcttgactccttggagaacaatattcatttggttgtggagactgatttgctgggagaaatctgtcctgttactttctggtcatcccaggttctgacttttaccag

SEQ ID NO: 663 - DNA, 567 bp, Homo sapiens
gcctggatgaacctctatcgggtgttcgtgggcttcctcttcccgtgggcgctcatgctgctgtcgtaccggggcatcctgcgggccgtgcggggcagcgtgtccaccgagcgccaggagaaggccaagatcaagcggctggccctcagcctcatcgccatcgtgctggtctgctttgcgccctatcacgtgctcttgctgtcccgcagcgccatctacctgggccgcccctgggactgcggcttcgaggagcgcgtcttttctgcataccacagctcactggctttcaccagcctcaactgtgtggcggaccccatcctctactgcctggtcaacgagggcgcccgcagcgatgtggccaaggccctgcacaacctgctccgctttctggccagcgacaagccccaggagatggccaatgcctcgctcaccctggagaccccactcacctccaagaggaacagcacagccaaagtcatgactggcagctgggccgccactccgccctcccagggggaccaggtgcagctgaagatgctgccgccagcacaatgaaccccgagtggc

SEQ ID NO: 664 - DNA, 497 bp, Homo sapiens
aagcggagaagcacgttcataacttcatgatggacactcagctcaccaagcggatcaagaatgctgcagccaatgtccttcgggaaacatggttaatctataaacacacaaagctgctaaagaagattgaccatgccaaagtgaggaaacaccagaggaagttcctccaagctatccaccagttgaggagcgtcaagatggaacagaggaagctgagtgaccaagccaacactctggtggacctttccaagatgcagaatgtcatgtatgacttaatcacagaactcaatgaccggagcgaagacctggagaagcagattggcagcctggagtcgaagctggagcatctcaccgccagcttcaactccctgccgctgctcatcgccgacaccctgcgccagcagcagcagcagctcctgtctgccatcatcgaggcccggggtgtcagcgtggcagtgggcaccacccacaccccaatctccgatagccccattggg

SEQ ID NO: 665 - DNA, 534 bp, Homo sapiens
  misc_feature (235)..(253): n is a, c, g, or t
  misc_feature (334)..(366): n is a, c, g, or t
  misc_feature (380)..(394): n is a, c, g, or t
  misc_feature (479)..(479): n is a, c, g, or t
  misc_feature (490)..(490): n is a, c, g, or t
  misc_feature (496)..(496): n is a, c, g, or t
gctccaggccaaagtgccggtgagacccatggctgtgttggtgtggcccatggctgttggtgggacccgtggctgatggtgtggcctgtggctgtcggtgggactcgtggctgtcaatgggacctgtggctgtcggtgggacctacggtggtcggtgggaccctggttattgatgtggccctggctgccggcacggcccgtggctgttgacgcacctgtggttgttagtggggcnnnnnnnnnnnnnnnnnnnccaaggccggcaggtcaacctcgcgcttgctggccagtccaccctgcctgccgtctgtgcttcctcctgcccagaacgccnnnnnnnnnnnnnnnnnnnnnnnnnnnnnnnnngtgcccttcctgcnnnnnnnnnnnnnnntcctgggacggcggcagtattgaagctcgtgacaagtgccttcacacagacccctcgcaactgtccacgcgtgccgtggcaccangcgctgcccancctgcnggccccggccgcccctcctcgtgaaagtgcatttttgt

SEQ ID NO: 666 - DNA, 570 bp, Homo sapiens
gcataaggaagcccactttatctaaatgatattagccaggatccttggtgtcctaggagaaacagacaagcaaaacaaagtgaaaaccgaatggattaacttttgcaaaccaagggagatttcttagcaaatgagtctaacaaatatgacatccgtctttcccacttttgttgatgtttatttcagaatcttgtgtgattcatttcaagcaacaacatgttgtattttgttgtgttaaaagtacttttcttgatttttgaatgtatttgtttcaggaagaagtcattttatggatttttctaacccgtgttaacttttctagaatccaccctcttgtgcccttaagcattactttaactggtagggaacgccagaacttttaagtccagctattcattagatagtaattgaagatatgtataaatattacaaagaataaaaatatattactgtctctttagtatggttttcagtgcaattaaaccgagagatgtcttgtttttttaaaaagaatagtatttaataggtttctgacttttgtggatcattttgcacatagctttatcaact

SEQ ID NO: 667 - DNA, 238 bp, Homo sapiens
ttttcctgggactgccatattttcttttaactggaaatttttatgtgagttttccttttggtgcatggaactgtggttgccaaggtatttaaaagggctttcctgcctccttctctttgatttatttaatttgatttgggctataaaatatcatttttcaggtttattcttttagcaggtgtagttaaacgacctccactgaactgggtttgacctctgttgtactgatgtgttgtga

SEQ ID NO: 668 - DNA, 496 bp, Homo sapiens
tcgacctgatgcagagccttctgaggagaggcaacaggaggcattctgtggccagccaaaaggtaccccgatggccaagcaattcctctgaacaaaatgtaaagccagccatgcattgttaatcatccatcacttcccattttatggaattgcttttaaaatacatttggcctctgcccttcagaagactcgtttttaaggtggaaactcctgtgtctgtgtatattacaagcctacatgacacagttggatttattctgccaaacctgtgtaggcattttataagctacatgttctaatttttaccgatgttaattattttgacaaatatttcatatattttcattgaaatgcacagatctgcttgatcaattcccttgaatagggaagtaacatttgccttaaattttttcgacctcgtctttctccatattgtcctgctcccctgtttgacgacagtgcatttgccttgtcacctgtgagctggagagaaccc

SEQ ID NO: 669 - DNA, 431 bp, Homo sapiens
  misc_feature (90)..(90): n is a, c, g, or t
ggagttcaacatgctgagtgccctcaatgagatctactcctatgtcagcaagtatagtgaggagctcatcggggccctagagcaggatgngcaggcacggcggcagcggctggcttataaggtggagcagctcattaatgccatgtccattgagagctgagaggaggagcctcgcattcctgggaagagggacctgtccaagctgtcacactgggagtctcagatggaaggacaagtgatggggatcaggccccagagcttgctgtcccctgagaccccatcctggggagaggggaggactcctctccctacgccagccaagtttcgtcatagccagttccagctgggagagacagtgggcgtcgtccatcctcagtgagaacaccagagaacccggggccgggagaaggtggttcttcaagccgagaggc

SEQ ID NO: 670 - DNA, 454 bp, Homo sapiens
aggactggacatatctgcactcctgccctctgacttcagccgctacttccaatatgaggggtctctgactacaccgccctgtgcccagggtgtcatctggactgtgtttaaccagacagtgatgctgagtgctaagcagctccacaccctctctgacaccctgtggggacctggtgactctcggctacagctgaacttccgagcgacgcagcctttgaatgggcgagtgattgaggcctccttccctgctggagtggacagcagtcctcgggctgctgagccagtccagctgaattcctgcctggctgctggtgacatcctagccctggtttttggcctcctttttgctgtcaccagcgtcgcgttccttgtgcagatgagaaggcagcacagaaggggaaccaaagggggtgtgagctaccgcccagcagaggtagccgagactggagcctag

SEQ ID NO: 671 - DNA, 536 bp, Homo sapiens
gagttcttccgggggacacgaattgcctggctgagtagcaagaaagacacactcttaagtttcttggttcagagcaggaaaaccttcaaggagctgactgaccacgtagcatgggggcaagaggcgtgggatggggattggggtgagatggatgggagcccgctggagcttgtcttccctaacatagcctgggagaccaccccttgccacttgggccacttccgcctaccccacttttcattttgttccaaaatagttgcagatcctgacagaatcaaaactctctgcctcaaacacacatcctggcatcgcactgttagcatttaacttcttgttaggattcagggaaggaacagttggccaagaattttttttcttttaaacaagccaaccacctagctggtaattaatgaggttcacttaaaaaaaaaaattcggtgcacacagactgacatgaaacctgggtgctacagtaaaagaaaacaaaagtccagtttgtgtctcttaatcgctcacttcaactcatttcttctaaa

SEQ ID NO: 672 - DNA, 557 bp, Homo sapiens
atccgaattctccatatattcactaatcaaagacactattttcatactagattcctgagacaaatactcactgaagggcttgtttaaaaataaattgtgttttggtctgttcttgtagataatgcccttctattttaggtagaagctctggaatccctttattgtgctgttgctcttatctgcaaggtggcaagcagttcttttcagcagattttgcccactattcctctgagctgaagttctttgcatagatttggcttaagcttgaattagatccctgcaaaggcttgctctgtgatgtcagatgtaattgtaaatgtcagtaatcacttcatgaatgctaaatgagaatgtaagtatttttaaatgtgtgtatttcaaatttgtttgactaattctggaattacaagatttctatgcaggatttaccttcatcctgtgcatgtttcccaaactgtgaggagggaaggctcagagatcgagcttctcctctgagttctaacaaaatggtgctttgagggtcagcctttaggaaggtgcagctttgttgtcctttg

SEQ ID NO: 673 - DNA, 498 bp, Homo sapiens
caccaagccgacctcagagttgttcatcttccttatgggacaaaaccggttgaccagaaaatgggcagagagagatgacctcggaagcatttccacagatggtgtcagggtttcaagaagtcttagggcttccaggggtcccctggaagctttagaatatttatgggtttttttttcaaatatcaattatatggtagattgaggattttttttctgtagctcaaaggtggagggagtttattagttaaccaaatatcgttgagaggaatttaaaatactgttactaccaaagatttttattaataaaggcttatattttggtaacacttctctatatttttactcacaggaatgtcactgttggacaattattttaaaagtgtataaaaccaagtctcataaatgatatgagtgatctaaatttgcagcaatgatactaaacaactctctgaaatttctcaagcaccaagagaaacatcattttagcaaaggccagga

SEQ ID NO: 674 - DNA, 502 bp, Homo sapiens
ccctctaccatttgcagagtcctgcacagttttctggctggagcctagaacaggcctcccaagttttaggacaaacagctcagttctagtctctctggggccacacagaaactctttttgggctcctttttctccctctggatcaaagtaggcaggaccatgggaccaggtcttggagctgagcctctcacctgtactcttccgaaaaatcctcttcctctgaggctggatcctagccttatcctctgatctccatggcttcctcctccctcctgccgactcctgggttgagctgttgcctcagtcccccaacagatgcttttctgtctctgcctccctcaccctgagccccttccttgctctgcacccccatatggtcatagcccagatcagctcctaacccttatcaccagctgcctcttctgtgggtgacccaggtccttgtttgctgttgatttctttccagaggggttgagcagggatcctggtttcaatgacggtt

SEQ ID NO: 675 - DNA, 372 bp, Homo sapiens
gaaagacattcttccccaggaggaatgtttaaaatggaggcaacattttggccaacattggaaagcactagagggcaatgggattaaaccaacctgcttggtctctattagtcagtaatgaagacgacagcctggccaaccaagggaaaggaaattagtatctttagtttcagtcattccttgtaggatatggtttagctgtgcccccacctaaaatatcatcttgaattgtaatccctataatccccacatcaagggagagatcaggtggaggtaattggatcttgggggcggttcccccatgctgttcttgtgatagttctcacgagatctgatgattttataagtttgatagttcctcctgtgttcatt

SEQ ID NO: 676 - DNA, 447 bp, Homo sapiens
ggagcaatccaagccacatatcttctacatcaaatttttccattttggttattttcataatctggtattgcattttgccttccctgttcatacctcaaattgattcatacctcagtttaattcagagaggtcagttaagtgacggattctgttgtggtttgaatgcagtaccagtgttctcttcgagcaaagtagacctgggtcactgtaggcataggacttggattgcttcagatggtttgctgtatcatttttcttctttttcttttcctggggacttgtttccattaaatgagagtaattaaaatcgcttgtaaatgagggcatacaagcatttgcaacaaatattcaaatagaggctcacagcggcataagctggactttgtcgccactagatgacaagatgttataactaagttaaaccacatctgtgtatctcaagggact

SEQ ID NO: 677 - DNA, 496 bp, Homo sapiens
cacagactgtgcgcctcagaaggaataatcggtaaattaagaattgctactcgaaggtgccagaatgacacaaaggacagaattcctttcccagttgttaccctagcaaggctagggagggcatgaacacaaacataagaactggtcttctcacactttctctgaatcatttaggtttaagatgtaagtgaacaattctttctttctgccaagaaacaaagttttggatgagcttttatatatggaacttactccaacaggactgagggaccaaggaaacatgatgggggaggcaagagagggcaaagagtaaaactgtagcatagcttttgtcacggtcactagctgatccctcaggtctgctgcaaacacagcatggaggacacagatgactctttggtgttggtctttttgtctgcagtgaatgttcaacagtttgcccaggaactgggggatcatatatgtcttagtggacaggggtctgaagtacactgga

SEQ ID NO: 678 - DNA, 571 bp, Homo sapiens
gtcatattgtttcctgtgctggagcaaaagtcattacactttgaagtattatattgttcttatcctcaattcaatgtggtgatgaaattgccaggttgtctgatatttctttcagacttcgccagacagattgctgataataaattaggtaagataatttgttgggccatattttaggacaggtaaaataacatcaggttccagttgcttgaattgcaaggctaagaagtactgcccttttgtgtgttagcagtcaaatctattattccactggcgcatcatatgcagtgatatatgcctataatataagccataggttcacaccattttgtttagacaattgtctttttttcaagatgctttgtttctttcatatgaaaaaaatgcattttataaattcagaaagtcatagatttctgaaggcgtcaacgtgcattttatttatggactggtaagtaactgtggtttactagcaggaatatttccaatttctacctttactacatcttttcaacaagtaactttgtagaaatgagccagaagccaaggccctgagttggcagtggcccat

SEQ ID NO: 679 - DNA, 511 bp, Homo sapiens
atgagatgtatcttttgctctctcttgctctcttatttgtaccggtttttgtatataaaattcatgtttccaatctctctctccctgatcggtgacagtcactagcttatcttgaacagatatttaattttgctaacactcagctctgccctccccgatcccctggctccccagcacacattcctttgaaagagggtttcaatatacatctacatactatatatatattgggcaacttgtatttgtgtgtatatatatatatatatgtttatgtatatatgtgatcctgaaaaaataaacatcgctattctgttttttatatgttcaaaccaaacaagaaaaaatagagaattctacatactaaatctctctccttttttaattttaatatttgttatcatttatttattggtgctactgtttatccgtaataattgtggggaaaagatattaacatcacgtctttgtctctagtgcagtttttcgagatattccgtagtacatatttatt

SEQ ID NO: 680 - DNA, 525 bp, Homo sapiens
gaaatagcaaacaacctacatgtttgctgataaaagattggctaaacaaaattttttttttttttgagacagaatctccctctgtcccccaggctggagtgcagtggtgcgatctcggctcactgcaagctctgcctcccgggttcacgcccttctcctgcctcagcctcccgagtagctgggactacaggtgccctccaccacgcttggctaatttttttgtatatttaatagagacagggtttcaccatgttagccaggatggtctcgatctcctgacctcgtgatccacctgcctcggcctccccaaagtgctgggatgacaggcatgagccaccacgcctggtctatgaactttttaaaaaggatgtatgtgtataaacagattcaagggaaaggcactaaatggttttttcctctggaagatgagattgtaggtgatatttattttcttctgaaacttttgtatagtttgcaaattttctacagtgaacattcttttttacttttgttactagattgaat

SEQ ID NO: 681 - DNA, 458 bp, Homo sapiens
  misc_feature (39)..(39): n is a, c, g, or t
  misc_feature (42)..(43): n is a, c, g, or t
  misc_feature (45)..(45): n is a, c, g, or t
  misc_feature (50)..(50): n is a, c, g, or t
  misc_feature (60)..(60): n is a, c, g, or t
  misc_feature (65)..(65): n is a, c, g, or t
  misc_feature (79)..(79): n is a, c, g, or t
  misc_feature (85)..(86): n is a, c, g, or t
  misc_feature (96)..(96): n is a, c, g, or t
  misc_feature (98)..(98): n is a, c, g, or t
  misc_feature (104)..(104): n is a, c, g, or t
  misc_feature (107)..(107): n is a, c, g, or t
  misc_feature (112)..(112): n is a, c, g, or t
  misc_feature (116)..(116): n is a, c, g, or t
  misc_feature (121)..(121): n is a, c, g, or t
  misc_feature (125)..(126): n is a, c, g, or t
  misc_feature (129)..(139): n is a, c, g, or t
  misc_feature (141)..(146): n is a, c, g, or t
  misc_feature (150)..(150): n is a, c, g, or t
  misc_feature (204)..(204): n is a, c, g, or t
  misc_feature (211)..(211): n is a, c, g, or t
  misc_feature (215)..(215): n is a, c, g, or t
  misc_feature (234)..(234): n is a, c, g, or t
tgcccttcacaccttttggtgctacccctccccagagtnaannantggangtctcctgancccangctgggacccctanccccannccccctttgnancctttnctnacttnccanggtgnaaannacnnnnnnnnnnncnnnnnngggnaagagggacttcccttgactgggttgtgtttcttttcctgcctcagcccagctntgcaaancccntccccctgcccctcacctnccccaggctcaccttgccatgccaggtggtttggggaccaagatgttgggggggtgaatcaggatcctaatggtgctgccctatttatacctgggtctgtattaaaagggaaagtcccccctgttgtagatttcatctgcttcctccttagggaaggctgggatatgatgagagattccagcccaagcccggccccccaccgccaggccatagggcataatttg

SEQ ID NO: 682 - DNA, 525 bp, Homo sapiens
ctacgtggagtcaccatgctgagtcgcccttctcagcgttccatcgatgcacacctgctatcgtggaacagcctagaaaccaagggactccaccaccaagtcacttcccctgctcgtgcagaggcacgggatgagtctgggtgacctctgcgccatgcgtgcgagacacgtgtgcgtttactgttatgtcggtcatatgtctgtacgtgtcgtgggccaacctcgttctgcctccagctttcctggttagcgcaacgcggctccacgaccacacgcacttcagggtggaagctggaagctgagacacaggttaggtggcgcgaggctgccctgcgctccgctttgctttgggattaatttattctgcatctgctgagaggggcaccccagccatatcttacactttggtaaagcagaaaaccaggaaaattttcttaaaatatccacaatattccttgagtgagtcagaatctatagccggttagtgatggtttcaggcagaatcgtgttcgtgtctgttttgct

SEQ ID NO: 683 - DNA, 345 bp, Homo sapiens
ttgaagggggtggtgtgggagtggccctttaactcctatttggctatctgaggatgtacaaaattctcatttaattttctggtcagcaagttccccacacagaaatcactctgaggtttacagaagaactgtaatattattttaaaatgcgattttctgtcattagttctagatatgtacttcatggttaaattctaaatctgaaaatgctagtgggagatatcaagaaattttctttttgattactagtacctgtattctaacagagagtttgaattttttgcccgtgttatcagaatgatggaaattgatcattttcagttgttcattgtgtattcaatccag

SEQ ID NO: 684 - DNA, 553 bp, Homo sapiens
gaaggggaatcgcgggaagctggcccaggtcaggtccgcaaaggcttctgaagaagaggaagggcgagtaggggcacctggacgctgatggtggccaggatgctcagctggccaggagggcagcacctgctggggacggtggccctgccttcatgcccaggacaccagctgggtccagctagcagccactgggaatcagaggaatggggcagagctgggcattcaggaccttgaggacacgtgaccccacccgcccaccgccactatcaggccccgggaccgcactgacaggaaaccttccgtcgtgagggagcacttcccaggggccgcagggacgacactctccagggaggccccagcaaccacaccatcttcttgctgtgagaggtctcaccccgggctacctcctgtcactactcactgccctggggtccgtgggcaagttgcccagggtgggggtgcctagccaggtgcagtccccgccccgcctagtcctcggcgtcacgcaatgctcacctcgcctcttccccactaacatcccagactttaaaat

SEQ ID NO: 685 - DNA, 453 bp, Homo sapiens
  misc_feature (178)..(178): n is a, c, g, or t
gttacctacctgtgtagccgaagtagtgtgcagtgaggcgtttctgaatacatggtcagatttttggaaaaaaacaaaaacaaaaaaaacaagtaaagttcaaaaaccgtcaaatgagaaaattgcaagtagtgtgacagagctgattgattttgttgctttcttgattttttttttncaaaatgggtttactaaaatgtagatgacttaactgcctcctccttcgtctgaaaaatgccaatattcaatcatcatgcagcattataacaagccttataagtcctaaagcattaagttgcacttttttgaggaggggtagtgcagtatttctctggccagtatgaatgaagtttatacttaccatatttgatagaaacatagatcaagctatggcacagcgactcatcagatagctagctttgacgtctgggcacaattgaaccaacttccatc

SEQ ID NO: 686 - DNA, 505 bp, Homo sapiens
gctgaggacaggcttgcctggacttctgtaagataggattttctgtgtttcctgaattttttatatggtgatttgtatttaaattttaagactttattttctcactattggtgtaccttataaatgtatttgaaagttaaatatattttaaatattgtttgggaggcatagtgctgacatatattcagagtgttgtagttttaaggttagcgtgacttcagttttgactaaggatgacactaattgttagctgttttgaaattatatatatataaatatatataaatatataaatatatgccagtcttggctgaaatgttttatttaccatagttttatatctgtgtggtgttttgtaccggcacgggatatggaacgaaaactgctttgtaatgcagtttgtgacattaatagtattgtaaagttacattttaaaataaacaaaaaactgttctggactgcaaatctgcacacacaacgaacagttgcatttcagagagttctc

SEQ ID NO: 687 - DNA, 245 bp, Homo sapiens
  misc_feature (49)..(49): n is a, c, g, or t
  misc_feature (143)..(143): n is a, c, g, or t
  misc_feature (166)..(166): n is a, c, g, or t
ggagcagagaaagacagtggtacagctaacctgaacaagggaactgggnccgttgggctgaaacagtcttgagcctggggttgactgggttagagaagaaccgggatgcaaggagctgcctgtgacacctggcctgccctttntcagctgcctcccctgccctttntcagctgcctcccctgccctcagaaggaaaggagagggctcacttatcacttgtgccatagcacctggtctcaaaatcc

SEQ ID NO: 688 - DNA, 395 bp, Homo sapiens
gctctggtgctagatgccactgtagccagatctccaacagtgccttggaccatggactcatactcaactgagtaagaaggggctggtgcccagtcggggtggctgagctggtccttaataggttgtttcttggtcttgctttcttcatgccctccccactgctcctgccacctttagataagtttctctagctaattttgtggccaatgtaaaattcgtcatcaacctaacaaacacaaccttctcagcagcatttctcccctgtgatggaaataaagtgtttagggcagtgggaggagaaaattctccaggtgaatggggaagggtctgttccagcctctccctactcccatcccatttccaccaactggggaactgtgactatctatctcccc

SEQ ID NO: 689 - DNA, 375 bp, Homo sapiens
ggatctggacttcgaggtcggtggtgctgcccccttcaacaggactcacaggagcaagcggtcatcatcccatcccatcttccacaggggcgaattctcggtgtgtgacagtgtcagcgtgtgggttggggataagaccaccgccacagacatcaagggcaaggaggtgatggtgttgggagaggtgaacattaacaacagtgtattcaaacagtacttttttgagaccaagtgccgggacccaaatcccgttgacagcgggtgccggggcattgactcaaagcactggaactcatattgtaccacgactcacacctttgtcaaggcgctgaccatggatggcaagcaggctgcctggcggtttatccggataga

SEQ ID NO: 690 - DNA, 343 bp, Homo sapiens
tccctccctcaggggctgtaagggaaggcccaccccaactcttaccaggagctgctacaggcagagcccagcactgatagggccccgcccaccgggccccgcccaccccaggccacatccccacccatctggaagtgaaggcccagggactcctccaacagacaacggacggacggatgccgctggtgctcaggaagagctagtgccttaggtgggggaaggcaggactcacgactgagagagagaggagggggatatgaccaccctgccccatctgcaggagcctgaagatccagctcaagtgccatcctgccagtggcccccagactgtggggttgggacg

SEQ ID NO: 691 - DNA, 420 bp, Homo sapiens
  misc_feature (83)..(83): n is a, c, g, or t
cactttgcaactccctgggtaagagggacgacacctctggtttttcaataccaattacatggaacttttctgtaatgggtacnaatgaagaagtttctaaaaacacacacaaagcacattgggccaactatttagtaagcccggatagacttattgccaaaaacaaaaaatagctttcaaaagaaatttaagttctatgagaaattccttagtcatggtgttgcgtaaatcatattttagctgcacggcattaccccacacagggtggcagaacttgaagggttactgacgtgtaaatgctggtatttgatttcctgtgtgtgttgccctggcattaagggcattttacccttgcagttttactaaaacactgaaaaatattccaagcttcatattaaccctacctgtcaacgtaacgat

SEQ ID NO: 692 - DNA, 526 bp, Homo sapiens
gtccacattcctgcaagcattgattgagacatttgcacaatctaaaatgtaagcaaagtagtcattaaaaatacaccctctacttgggctttatactgcatacaaatttactcatgagccttcctttgaggaaggatgtggatctccaaataaagatttagtgtttattttgagctctgcatcttaacaagatgatctgaacacctctcctttgtatcaataaatagccctgttattctgaagtgagaggaccaagtatagtaaaatgctgacatctaaaactaaataaatagaaaacaccaggccagaactatagtcatactcacacaaagggagaaatttaaactcgaaccaagcaaaaggcttcacggaaatagcatggaaaaacaatgcttccagtggccacttcctaaggaggaacaaccccgtctgatctcagaattggcaccacgtgagcttgctaagtgataatatctgtttctactacggatttaggcaacaggacctgtacattgtcacattgcat

SEQ ID NO: 693 - DNA, 492 bp, Homo sapiens
cccattcggccaagctggattctgtgtacctagtacacaggcatgactgggatcccgtgtaccgagtacacgacccaggtatgtaccaagtaggcacccttgggcgcacccactggggccaggggtcgggggagtgttgggagcctcctccccaccccacctccctcacttcactgcattccagattggacatgttccatagccttgctggggaagggcccactgccaactccctctgccccagccccacccttggccatctccctttgggaactagggggctgctggtgggaaatgggagccagggcagatgtatgcattcctttatgtccctgtaaatgtgggactacaagaagaggagctgcctgagtggtactttctcttcctggtaatcctctggcccagccttatggcagaatagaggtatttttaggctatttttgtaatatggcttctggtcaaaatccctgtgtagctgaattcccaagccct

SEQ ID NO: 694 - DNA, 495 bp, Homo sapiens
gtgaaccaggagatttagtgcttttatattcatttccttgcatttaagaaaatatgaaagcttaaggaattatgtgagcttaaaactagtcaagcagtttagaaccaaaggcctatattaataaccgcaactatgctgaaaagtacaaagtagtacagtatattgttatgtacatatcattgttaatacagtcctggcattctgtacatatatgtattacatttctacatttttaatactcacatgggcttatgcattaagtttaattgtgataaatttgtgctgttccagtatatgcaatacactttaatgttttattcttgtacataaaaatgtgcaatatggagatgtatacagtctttactatattaggtttataaacagttttaagaatttcatccttttgccaaaatggtggagtatgtaattggtaaatcataaatcctgtggtgaatggtggtgtactttaaagctgtcaccatgttatattttctt

SEQ ID NO: 695 - DNA, 453 bp, Homo sapiens
  misc_feature (94)..(94): n is a, c, g, or t
  misc_feature (201)..(201): n is a, c, g, or t
  misc_feature (211)..(214): n is a, c, g, or t
gatgagggcaaaccagttaaacctaacaccctgccttgtctgggctcatcacctctccctatcccagactaactttactgtgaaatcctaccancattccatgtctgaatttttggattcggggtggattttcgttgtccgtggaagaacacatggatctctctggctttctcacccaagttggccacttacgctaatccnggaagtatgnnnncttttgaacctgccccttaaccttgacgaggatacaaaagtgaaagcatcatcccccaaaggatcactgcacagtcctactacagtatttttaagtagccctctaaatacttaattttaagcaaaatcccttggccgcacttttaaggtttttttatatgtgtatagttaccaacctaaaaataaaaaatccgaacagcatacttgaagaatgtaatactcaaactctcagtgcttcct

SEQ ID NO: 696 - DNA, 539 bp, Homo sapiens
aggactcaagacatctcagtgttcttcaccgtctctttcagcatcaccaggcagtcccacacgaccacagatacggcaaaagatagagaataaaccccttcaagaacaactttctgttaaccaaattaaaactgaacctgtggattatgaattcaaacccatagtggttgcttcaggaatcaactgttcaacccctttacaaaatggggttttcactggtggtggcccattacaggcaaccagttctcctcagggcatggtgcaagctgttgttctgccaacagttggtttggtgtctcccataagtatcaatttaagtgatattcagaatgtacttaaagtggcggtagatggtaatgtaataaggcaagtgttggagaataatcaagccaatcttgcatccaaagaacaagaaacaatcaatgcttcacccatacaacaaggtggccattctgttatttcagccatcagtcttcctttggttgatcaagatggaacaaccaaaattatcatcaactacagtcttgagcagcctagcc

SEQ ID NO: 697 - DNA, 485 bp, Homo sapiens
atgtcacccaacagaggggtcctgagaagtctggctgcctgggatgccccctgccccctcctggaaggctctgcagagatgactgggctggggaagcagatgcttgctggccatggagcctcattgcaagttgttcttgaacacctgaggccttcctgtggcccaccaggcactacggcttcctctccagatgtgctttgcctgagcacagacagtcagcatggaatgctcttggccaagggtactggggccctctggccttttgcagctgatccagaggaacccagagccaacttaccccaacctcaccctatggaacagtcacctgtgcgcaggttgtcctcaaaccctctcctcacaggaaaaggcggattgaggctgctgggtcagccttgatcgcacagacagagcttgtgccggatttggccctgtcaaggggactggtgccttgttttcatcactccttcctagttctactgttcaag

SEQ ID NO: 698 - DNA, 477 bp, Homo sapiens
aaagcagcgctagtggagggttggagaaggaggtaaggatgagggttcatcatccctccctgcctaaggaagctaaaagcatggccctgctgcccctccctgcctccacccacagtggagagggctacaaaggaggacaagaccctctcaggctgtcccaagctcccaagagcttccagagctctgacccacagcctccaagtcaggtggggtggagtcccagagctgcacagggtttggcccaagtttctaagggaggcacttcctcccctcgcccatcagtgccagcccctgctggctggtgcctgagcccctcagacagccccctgccccgcaggcctgccttctcagggacttctgcggggcctgaggcaagccatggagtgagacccaggagccggacacttctcaggaaatggcttttcccaacccccagcccccacccggtggttcttcctgttctgtgactgtgtatag

SEQ ID NO: 699 - DNA, 567 bp, Homo sapiens
tagtcatgccctaaagctagtcctgtaaacaatggtgccccagaaagctgcaggtggtgtttggagaagcagttacttttcagttacaagacccatctccctagtctcagccttacaacaccacgggactaaggaagagcacttccttgcctccgtaaggccagaggaagaaccatcccaatcatttgatctccagctccacagtagagagaaacctacaaaatgtcaaaccagcttcccgactcccaggagctcaagccaagcccagaggcagtggctggggtccctgcaggtcatgaggggcctatgcctttactccttttaaacaccagcacccgtcttttccccaacctaaaaccaaccaccagcatttcactacaggaccaaatggaaaccgagggaaccctgggtcttgggaagaacaacaggaaaccaaggtctgacctagggttccctcccagtcttcacatcactctggcctcatcaccaaggtgacagaggacacaggggagggggaaaacccacacacactccttggaatgggtcctgttatttatgcttgctgca

SEQ ID NO: 700 - DNA, 426 bp, Homo sapiens
ctcgagggttcatgcagtcagtgttataccaaacccagtgttaggagaaaggacacagcgtaatggagaaaggggaagtagtagaattcagaaacaaaaatgcgcatctctttctttgtttgtcaaatgaaaattttaactggaattgtctgatatttaagagaaacattcaggacctcatcattatgtgggggctttgttctccacagggtcaggtaagagatggccttcttggctgccacaatcagaaatcacgcaggcattttgggtaggcggcctccagttttcctttgagtcgcgaacgctgtgcgtttgtcagaatgaagtatacaagtcaatgtttttccccctttttatataataattatataacttatgcatttatacactacgagttgatctcggccagccaaagacacacgacaa

SEQ ID NO: 701 - DNA, 552 bp, Homo sapiens
gattgattgggcttcctcataggaagcactgagggtgtgtctttgtacttggttcattgcccttcacctggtagagaaagagaggtcagaaatagcaagcaaaaagcaggactcccaggagccacaagaaaagagcacaggctgcaccaaagcaggggcagcagagaataaaatatccctttgaacttgtcaacaattaaaaaactgcaaggagtcaccttataacactatttccagtaaaggtggaattgagtatcagagggattactgcggtgttaaggtagccctgccacgtggctctccaggcagggccaagaagacagcacaaagtatgggtttggccataagctcatatgctgcccccaaagactggggagagctgtgtgcctcagtgttgcagtgtgaattcctaaatagagggtaaagtgagcctagccaggaggtgtttggggctctatcgcgcatctctcctaccaagctgggcaagagcttttaggagattcatccagctttgtggatttagaaaggaagccttcagttccaatcagaatc

SEQ ID NO: 702 - DNA, 370 bp, Homo sapiens
tggtgtatgctgtgctttcctcagcagtatggctctgacatctcttagatgtcccaacttcagctgttgggagatggtgatattttcaaccctacttcctaaacatctgtctggggttcctttagtcttgaatgtcttatgctcaattatttggtgttgagcctctcttccacaagagctcctccatgtttggatagcagttgaagaggttgtgtgggtgggctgttgggagtgaggatggagtgttcagtgcccatttctcattttacattttaaagtcgttcctccaacatagtgtgtattggtctgaagggggtggtgggatgccaaagcctgctcaagttatggacattgtggccaccatgtggct

SEQ ID NO: 703 - DNA, 465 bp, Homo sapiens
cctaattcacacaaagactccttgtggactggctgtgcccctgatgcagcctgtggctggagtggccaaataggagggagactgtggtaggggcagggaggcaacactgctgtccacatgacctccatttcccaaagtcctctgctccagcaactgcccttccaggtgggtgtgggacacctgggagaaggtctccaagggagggtgcagccctcttgcccgcacccctccctgcttgcacacttccccatctttgatccttctgagctccacctctggtggctcctcctaggaaaccagctcgtgggctgggaatgggggagagaagggaaaagatccccaagaccccctggggtgggatctgagctcccacctcccttcccacctactgcactttcccccttcccgccttccaaaacctgcttccttcagtttgtaaagtcggtgattatatttttgggggct

SEQ ID NO: 704 - DNA, 548 bp, Homo sapiens
gactagtaaattgtctgcctcctatagcagaaaggtgaatgtacaaactgttggtggccctgaatccatctgaccagctgctggtatctgccaggactggcagttctgatttagttaggagagagccgctgataggttaggtctcatttggagtgttggtggaaaggaaactgaaggtaattgaatagaatacgcctgcatttaccagccccagcaacacaaagaatttttaatcacacggatctcaaattcacaaatgttaacatggataagtgatcatggtgtgcgagtggtcaattgagtagtacagtggaaactgttaaatgcataacctaattttcctgggactgccatattttcttttaactggaaatttttatgtgagttttccttttggtgcatggaactgtggttgccaaggtatttaaaagggctttcctgcctccttctctttgatttatttaatttgatttgggctataaaatatcatttttcaggtttattcttttagcaggtgtagttaaacgacctccactgaactgggtttg

SEQ ID NO: 705 - DNA, 149 bp, Homo sapiens
  misc_feature (55)..(55): n is a, c, g, or t
atattttgtatcatcgtgcctatagccgctgccaccgtgtataaatcctggtgtntgctccttatcctggacatgaatgtattgtacactgacgcgtccccactcctgtacagctgctttgtttctttgcaatgcattgtatggcttta

SEQ ID NO: 706 - DNA, 405 bp, Homo sapiens
tggcaagagatttgtcttcttttcttgtcttcaattggctttcgggccttgtatgtggtaaaatcaccaaatcacagtcaagactgtgtttttgttcctagtttgatgcccttatgtcccggaggggttcacaaagtgctttgtcaggactgctgcagttagaaggctcactgcttctcctaagccttctgcacagatgtggcacctgcaacccaggagcaggagccggaggagctgccctctgacagcaggtgcagcagagatggctacagctcaggagctgggaaggtgatggggcacagggaaagcacagatgttctgcagcgccccaaagtgacccattgcctggagaaagagaagaaaatattttttaaaaagctagtttatttagcttctcattaattc

SEQ ID NO: 707 - DNA, 547 bp, Homo sapiens
  misc_feature (97)..(99): n is a, c, g, or t
  misc_feature (135)..(135): n is a, c, g, or t
  misc_feature (258)..(258): n is a, c, g, or t
agcatcggagccattcattcggagaaaacgttttgatcaaaatggagacttttgtagtcgtttcaaaagagcacctgagtcatgtgtattcccggcnnnctttataaatgacccggtcaagttggtttcaaagtncgacaggcttgtctgtttactagctgcgtggccttggacgggtggctgacatctgtaaagaatcctcctgtgatgaaactgaggaatcgggtggccgggcaagctgggaagagcaaagccagnagctgcgctgcctcaatacccacaaaagaccattcccagtatacataagcacaggatgtttttctcaagagggatgtatttatcacttggacatctgtttataatataaacagacatgtgactgggaacatcttgctgccaaaagaatcctaggcagtggctcattgtatgtgaggttgaaccacgtgaaattgccaatattaggctggcttttatctacaaagaaggagtttcatggggttcagcctaacagttatggaaactacagtccttataaaccattggcatg

SEQ ID NO: 708 - DNA, 360 bp, Homo sapiens
gcaataactctgggaggggctcgagagggctggtccttatttatttaacttcacccgagttcctctgggtttctaagcagttatggtgatgacttagcgtcaagacatttgctgaactcagcacattcgggaccaatatatagtgggtacatcaagtccatctgacaaaatggggcagaagagaaaggactcagtgtgtgatccggtttctttttgctcgcccctgttttttgtagaatctcttcatgcttgacatacctaccagtattattcccgacgacacatatacatatgagaatataccttatttatttttgtgtaggtgtctgccttcacaaatgtcattgtctactcctagaa

SEQ ID NO: 709 - DNA, 467 bp, Homo sapiens
ggaacgtataatgtttccaccccagaagcaaccagctcatccctggaaaactcatccagtgcttcttcgttgctcaactaagaacaggataatccaacctacgtgacctcccggggacagtggctgtgcttttaaaaagagatgcttgcaaagcaatggggaacgtgttctcggggcaggtttccgggagcagatgccaaaaagactttttcatagagaagaggctttcttttgtaaagacagaataaaaataattgttatgtttctgtttgttccctccccctcccccttgtgtgataccacatgtgtatagtatttaagtgaaactcaagccctcaaggcccaacttctctgtctatattgtaatatagaatttcgaagagacattttcactttttacacattgggcacaaagataagctttgattaaagtagtaagtaaaaggctacctaggaaatacttcagt

SEQ ID NO: 710 - DNA, 529 bp, Homo sapiens
attacggcttttctattgctgtatgatacagaactcttttggcataaatatttgtgttcccagtacctcacttgttcggatttgactgcctgtatatgttttgtgaaatggtcctgtttttgggtaggtgacacgtggactctagtatgtaaatgttacttgaatctgtgcttcataatagtgtgtggcatgtatgtgcagactcttggatgctttatgcctgcgcaccaggagccctgtcctcacgttcccaggagggcggcttcacccttcgtaaccaggagacaaggcggccatggatttgcccttgattctattttgctaatggaagatagaaaggagagaaggtttttttttttttttaacattctgaagatggtgctgtgtcaagaaggaccttttttttcccctctcccctattttttaagtaccttggaggaggagaggttggtgacatgcatggtggggatctatggcctctggtgctttgtcctgtatttggtttaatgtttttgtcctaatctcttca

SEQ ID NO: 711 - DNA, 555 bp, Homo sapiens
agatcaaggcctactgtgacatggaagctggaggaggcgggtggacaattattcagcgacgtgaggatggcagcgttgattttcagaggacttggaaagaatataaagtgggatttggtaacccttcaggagaatattggctgggaaatgagtttgtttcgcaactgactaatcagcaacgctatgtgcttaaaatacaccttaaagactgggaagggaatgaggcttactcattgtatgaacatttctatctctcaagtgaagaactcaattataggattcaccttaaaggacttacagggacagccggcaaaataagcagcatcagccaaccaggaaatgattttagcacaaaggatggagacaacgacaaatgtatttgcaaatgttcacaaatgctaacaggaggctggtggtttgatgcatgtggtccttccaacttgaacggaatgtactatccacagaggcagaacacaaataagttcaacggcattaaatggtactactggaaaggctcaggctattcgctcaaggccacaaccatgatgatccgac

SEQ ID NO: 712 - DNA, 487 bp, Homo sapiens
agtatgcaccaaacacttcgcaaaaacagaggccagtaaaacctggaattatcccggcagccagaggagtatggaacttccagaactttgcacaaattgcaaagccatcaagagctcaccctggctggctggaaactgagctttatctaccacacacctgtatattctcatcttttgagaggagatgtgtacctagatagtaccaatgctttttgctactgttttttgttttgttttatttaatcctaaacctcaacaaatgaggagctggtctttgatatgtttcctttcaatttccctaaagttactatgagaagtggggtgaggtgggcctctcccagaccagacacctggcagccctgcctcatatcaatccctgtcataaaccaggcaccctggggaaacggcctggaggtgtgtgggccaggcctccacgaggttccatttgaaagttgatttggagacataggtgtttgactttggagtt

SEQ ID NO: 713 - DNA, 409 bp, Homo sapiens
  misc_feature (231)..(231): n is a, c, g, or t
ccccagagaggcactcagtgagcctcctgtgcctggccccagcctgggccatctcttaggtgagacagttgcccgaaactaagccaggcctggctggaggagcagcagcttggggagagggatttccctgcagacctcaagccatcatgcggtgggtgctgccatgacagaggctgcacccctgggccagcggggctgctcacccacctcttgtgcaaggtggcctttgtnctgcgcctgcaggcagagctggagcccccagcagaggcaggctgggacggaccagcatctggaagatgtacatagttatttttctctttgtggtttcttgtttggtttggtttgcttttgacagcttcattttatttttgacgtcactttttggccatgtaaactatttgtggcaatt

SEQ ID NO: 714 - DNA, 383 bp, Homo sapiens
  misc_feature (121)..(121): n is a, c, g, or t
  misc_feature (145)..(145): n is a, c, g, or t
  misc_feature (147)..(147): n is a, c, g, or t
  misc_feature (161)..(194): n is a, c, g, or t
  misc_feature (201)..(201): n is a, c, g, or t
  misc_feature (206)..(206): n is a, c, g, or t
  misc_feature (228)..(228): n is a, c, g, or t
  misc_feature (235)..(235): n is a, c, g, or t
  misc_feature (358)..(358): n is a, c, g, or t
caacctgatcccacgagggagttgggacaggaggattgatggtgctccccttcctgccagcgtcagaggccctggagaggggctgtccatggcagctggtctttattcctccctcatgagnacagggtcgggggggtccccattntnggaagaggttgagnnnnnnnnnnnnnnnnnnnnnnnnnnnnnnnnnnctgcccntcacntgcctgccctcccctcccccantctatantagggactggatctcagcctctgatcagtttcacaaagtttgttccctaaggaaatcaaatcccattgtcacctaactctgaagatctaaatagcccttggatcagtacgggaaccccaaatnccacagggccagatgtggagtctgt

SEQ ID NO: 715 - DNA, 540 bp, Homo sapiens
  misc_feature (59)..(59): n is a, c, g, or t
  misc_feature (103)..(103): n is a, c, g, or t
gtttatacaactgtcagtccacccagtggtgcaactggttctgattcagtcttccgatncctttttatttttcactttttcctatttctgaattttttttttnatttgtgatcttgattttgatgaggggttggggagtggggagggagtcgaaccaagacttggagttaagaggattttcatcttttgcatccaacaggcagaatatgatctgtgtccaaaagtgaacttgagtcaggaatgaatcaatttcagcataaacaagcacaaaaatttagtctgctggctgactggaagcaaaaaagtcaagatggaatatgatgaattccaacacaatggggcaccaaggcctttaggcctctctttttattttgctttggttttgtttgtttttctttagagacatgctctttctcatgggacttgaagtggactcatctttgtgcagtgctggttttgccatactcatttcaagtattatagacatatgtaatggtgaaaatatatgaactgtggcctttttcattcttgttacttgtg

SEQ ID NO: 716 - DNA, 534 bp, Homo sapiens
ggattccctctactatggggacctcatcctgcagatgctctcagagtccgtcctgcctgagtggaccatccgggagtttaagatatgcggtgaggaacagcttgatgcacacagactcatccgccactttcactatacggtgtggccagaccatggagtcccagaaaccacccagtctctgatccagtttgtgagaactgtcagggactacatcaacagaagcccgggtgctgggcccactgtggtgcactgcagtgctggtgtgggtaggactggaacctttattgcattggaccgaatcctccagcagttagactccaaagactctgtggacatttatggagcagtgcacgacctaagacttcacagggttcacatggtccagactgagtgtcagtatgtctacctacatcagtgtgtaagagatgtcctcagagcaagaaagctacggagtgaacaagaaaaccccttgtttccaatctatgaaaatgtgaatccagagtatcacagagatccagtctattcaaggcattg

SEQ ID NO: 717 - DNA, 487 bp, Homo sapiens
aactcatacgtcctgtggtggcattgggagagttcccccatgatgagggccaagatagaatctgtaccactcagtgctaccatccccacccctacaccacttccacacaggggcctcatggcatggtcagggtcccagctgtaggtgagagcagggcactgtccagctgtccactggggaagtcaagatgtcctaaggcccaggtcagggcatctggagtctgaaggaccctagttcctagaggcatctggcagcaagaaggtgaggcatcagggaacgggaatcaggctgggactgatcagaggtgaagggacagagagaggagaggaggaagattgagctgggggcaacagccaagctcacctgggcaggtctctgccacctccttgctctgtgagctgtcagtctaggttattctctttttttgtggctatttttaattgctttggatttgttaaatgttttctgtcttctgttaagtgtgttt

SEQ ID NO: 718 - DNA, 313 bp, Homo sapiens
cggcccacaccctggaatgggagacgcatcgaatcacatgggacagatgtaaaagggtccaagttgccacattgcttcattaaaacaagagaccacttccttaacagctgtattatcttaaacccacataaacacttctccttaacccccatttttgtaatataagacaagtctgagtagttatgaatcgcagacgcaagaggtttcagcattcccaattatcaaaaaacagaaaaacaaaaaaaagaaagaaaaaagtgcaacttgagggacgactttctttaacatatcattcagaatgtgcaaagcagta

SEQ ID NO: 719 - DNA, 297 bp, Homo sapiens
cacccacaacatctacgaatcgtacttctttaattgatctaatttacatattctgcgtgttgtattcagcactaaaaaatggtgggagctgggggagaatgaagactgttaaatgaaaccagaaggatatttactacttttgcatgaaaatagagctttcaagtacatggctagcttttatggcagttctggtgaatgttcaatgggaactggtcaccatgaaactttagagattaacgacaagattttctactttttttaagtgatttttttgtccttcagccaaacacaatatgg

SEQ ID NO: 720 - DNA, 464 bp, Homo sapiens
tctgcctgcaggtttctatgctgtttcttagcacagaatccagcctagccttagccgcagtctaggccctgcttggactaggactccttgcttgaccccatctctggttcctgccctggctcctgcaccagccccagctcctgcctacatccaggcagaaatataggcaggggctcttggaagacgttccgtgctgtgacctccgagccctcctggtgggaagacagctggaaaggctgggaggagaagggaggggctgggggttcccaggagccatgcgtggcctgcagagtccattccatcatgatgctgtgcccgctatgggctgtgtccatgaccagaggctggagtgggggtgtgttatagcccctcaccgggacttgctgtgcggatggggcctgggcctccttcctacaggggctcctctgtgggtgaggggccctctggaatggcatcccatgagc

SEQ ID NO: 721 - DNA, 482 bp, Homo sapiens
gggtcaactgacatccattgtatatactagtttctttcatgctatttttattttgttttttgcatttttatcaaatgcagggcccctttctgatctcaccatttcaccatgcatcttggaattcagtaagtgcatatcctaacttgcccatattctaaatcatctggttggttttcagcctagaatttgatacgctttttagaaatatgcccagaatagaaaagctatgttggggcacatgtcctgcaaatatggccctagaaacaagtgatatggaatttacttggtgaataagttataaattcccacagaagaaaaatgtgaaagactgggtgctagacaagaaggaagcaggtaaagggatagttgctttgtcatccgtttttaattattttaactgacccttgacaatcttgtcagcaatataggactgttgaacaatcccggtgtgtcaggacccccaaatgtcacttctgcataaa

SEQ ID NO: 722 - DNA, 179 bp, Homo sapiens
gagatttaccatgtatcagtgcctggctttttgttataaagctttgtttgtctagtgctcttttgctataaaatagactgtagtacaccctagtaggaaaaaaaaaaaactaaatttaaaaataaaaaatatatttggcttatttttcgcaggagcaatccttttataccatgaatatt

SEQ ID NO: 723 - DNA, 397 bp, Homo sapiens
aagctagtatatttgtttcactgtttgtaatatttaagaaatgctcattctttgtagaacaaaaatgtattaaatattttaaaaattgctctgtgatacttaattttttccccaaaatttgtaatgtgttgcttctacataagttctctggaaatatctacaactaataggacacatgtaaatccttgaagacacatcctggaattcataccccacaaggacagtgtgtatacaaagtatttgcagagcatgacttttatatgtgtgggatatcaatgtgtatatttatatttaaagtgtatttattgttacaagtctattctctattatattttatttactctgcggttataaaaatcacccttgcatacaagtttctagttgccagtgatgttct

SEQ ID NO: 724 - DNA, 516 bp, Homo sapiens
gagagtgagcatgaggagcggcctgctggccagggccgggatgagcccaacatgaaccctaagcttgaggacccaaggcgccccgacacctccttcctgtggtttacctccccatacaagaccatgaagttcatcctgtggcggcgtttccggtgggccatcatcctcttcatcatcctcttcatcctgctgctgttcctggccatcttcatctacgccttcccgaactatgctgccatgaagctggtgaagcccttcagctgaggactctcctgccctgtagaaggggccgtggggtcccctccagcatgggactggcctgcctcctccgcccagctcggcgagctcctccagacctcctaggcctgattgtcctgccagggtgggcagacagacagatggaccggcccacactcccagagttgctaacatggagctctgagatcaccccacttccatcatttccttctcccccaacccaacgcttttttggatcagctcagacatatttcagta

SEQ ID NO: 725 - DNA, 452 bp, Homo sapiens
cacttattcttttcagtaacctgctagtgcacaggctgtactttaggtacttaaaatatgcactagaataaatttgcaaggccctaaaatatcactgttatttttggagtaattcagtataggttcgtttaaaagagatttttataacttcagacatgcatcagtaggaaataacttgagaaattcatatggttatgttacaaattcatattctgttactacagtaaacgttaagagttttaaacagttaagattgtacaatttttcttcttttctatattacaagggccccagtgttaatgtcttagattttcagtatttgaacttatttttttaaattctgtcattgagataagaataattcaggtagcatctgaaattttaatgaatgtataattggcatatcatggaaaattaaccagaaagtatcagttcttaaaagttatgcctag

SEQ ID NO: 726 - DNA, 530 bp, Homo sapiens
cccccatgcaatgagcttctaactcagagctgatgaacaaaagcccccccacccccaatgcctgcctcctcactcctccgtcgctgcccttcacaccttttggtgctacccctccccagagttaagcactggatgtctcctgatcccaggctgggacccctacccccaccccctttgatcctttctacttccacggtgaaaggactgaggtcggactacagagggaagagggacttcccttgactgggttgtgtttcttttcctgcctcagcccagctctgcaaatcccctccccctgcccctcacctccccaggctcaccttgccatgccaggtggtttggggaccaagatgttgggggggtgaatcaggatcctaatggtgctgccctatttatacctgggtctgtattaaaagggaaagtcccccctgttgtagatttcatctgcttcctccttagggaaggctgggatatgatgagagattccagcccaagcccggccccccaccgccaggccatagggcataatt

SEQ ID NO: 727 - DNA, 489 bp, Homo sapiens
cgtcagcacaccccgaatattgaagagggggccaaaaaacaaccacatggattttttataggaacaacaacctaatctcatcctgttttgatgcaagggttctcttctgtgtcttgtaaccatgaaacagcagaagaactaacataactaactccatttttgtttaaggggcctttacctattcctgcacctaggctaggataactttagagcactgacataaaacgcaaaaacaggaatcatgccgtttgcaaaactaactctgggattaaaggggaagcatgtaaacagctaactgtttttgttaaagatttataggaatgaggaggtttggctattgtcacatgacagactgttagccaaggacaaagaagttctgcaaacctcccctggacccttgctggtgtccagatgtctgcggttgtcagccccttcctttcccccgacctaaacataaaagacaaggcaaagcccgcataattttaagac

SEQ ID NO: 728 - DNA, 358 bp, Homo sapiens
  misc_feature (146)..(146): n is a, c, g, or t
  misc_feature (180)..(181): n is a, c, g, or t
gaaactgtatgggtagcttttttgtttgttttttgttttgtttttgtttttgtttttgtttttagttgtaggtcgcagcggggaaattttttgcgactgtacacatagctgcagcattaaaaacttaaaaaaattgttaaaaaaanaaaaaaagggaaaacatttcaaaaaaaaaaaaanngataaacagttacaccttgttttcaatgtgtggctgagtgcctcgattttttcatgtttttggtgtatttctgatttgtagaagtgtccaaacaggttgtgtgctggagttccttcaagacaaaaacaaacccagcttggtcaaggccattacctgtttcccatctgtagttattcg

SEQ ID NO: 729 - DNA, 533 bp, Homo sapiens
cactcgacccagaatggagcctgctctccgcgcctacccttcccgcctccctctcagaggcctgctgccagtgcagccactggcttggaacaccttggggtccctccaccccacagaaccttcaacccagtgggtctgggatatggctgcccaggagacagaccacttgccacgctgttgtaaaaacccaagtccctgtcatttgaacctggatccagcactggtgaactgagctgggcaggaagggagaacttgaaacagattcaggccagcccagccaggccaacagcacctccccgctgggaagagaagagggcccagcccagagccacctggatctatccctgcggcctccacacctgaacttgcctaactaactggcaggggagacaggagcctagcggagcccagcctgggagcccagagggtggcaagaacagtgggcgttgggagcctagctcctgccacatggagccccctctgccggtcgggcagccagcagagggggagtagccaagctgcttgtcctgggc

SEQ ID NO: 730 - DNA, 489 bp, Homo sapiens
gcatcctctgtagagggactccacccctgctcaacagcttggcttccaggcaagaccaaccacatctggtctctgccttcggtggcccacacacctaagcgtcatcgtcattgccatagcatcatgatgcaacacatctacgtgtagcactacgacgttatgtttgggtaatgtggggatgaactgcatgaggctctgattaaggatgtggggaagtgggctgcggtcactgtcggccttgcaaggccacctggaggcctgtctgttagccagtggtggaggagcaaggcttcaggaagggccagccacatgccatcttccctgcgatcaggcaaaaaagtggaattaaaaagtcaaacctttatatgcatgtgttatgtccattttgcaggatgaactgagtttaaaagaatttttttttctcttcaagttgctttgtcttttccatcctcatcacaagcccttgtttgagtgtcttatccctgagca

SEQ ID NO: 731 - DNA, 486 bp, Homo sapiens
tctcccaacctctactgtaaactttctggtccgagaacgagccgaacacagcgcgacgcagggactaggacggcccggtgaccgcgcggattcaggattgcggggacgcagaaaggttaaggcacttttaaaaactatagcaaggctcctgtttatttattctactttctttccctaataatcaaaacaccgcgtaggctcctccgtttatcagtattaatggtgtaactttgttggcaatatttgccgtgtagaattttttttagatatccattgtaaatttgaaacaaagaccgatctgtgtaaaaacaaatttccatatgttttatataaatatatatataatatgaaggactaccctcctttttttttttttgtattttggctgctagagtgcagcatttgtgacacgtatttgaaatttgaaatttccttctgcactgtataaaaggaccatttgaggatgttttgccttttgtgtatttt

SEQ ID NO: 732 - DNA, 538 bp, Homo sapiens
ctcagaatcccagaggcagtcccagcctcagaacccaggataggaaatgggtgtgtttagtggggaaagggacggggtgcagacggcagggccagtatggggccccctccctctcctctcctctcctatggtgagcccagcgtgggcaccgggccgtctcagccgtgttcccagggctgggaggacagctctggcccttcttaggcctagcctcgtcccaagctaaatgtaagccagttgggctgtgttaaaggaagcagtgtttttggtttgattctgcctctgtagctcaaggggggcagcccccagagtcctgtgcattctgccaaggctccatagctttgccaaatgcacggagctctgccattccggtgcagtgcaggccttgcgaagggtttatctgcgttcgtctcggtgggcttctcctgcatgggagttgtgttcctgtgcaagggggagctttgctcaggacaggatgactgtcttccctattcttagggacaagtcccaagatgccagaaaggcagtctcccaagga

SEQ ID NO: 733 - DNA, 536 bp, Homo sapiens
cctttgctccgttcattcattcaaaaaaacatttcttgagcaccttctgtgcccagcatatgctaggcccaccagctaagtgtgtgtggggggtctctacgccagctcatcagtgcctccttgcccatccttcaccggtgcctttgggggatctgtaggaggtgggaccttctgtggggtttggggatctccaggaagcccgaccaagctgtccccttcccctgtgccaacccatctcctacagccccctgcctgatcccctgctggctgggggcagctcccaggatatcctgccttccaactgtttctgaagcccctcctcctaacatggcgattccggaggtcaaggccttgggctctccccagggtctaacggttaaggggacccacataccagtgccaagggggatgtcaagtggtgatgtcgttgtgctcccctcccccagagcgggtgggcggggggtgaatatggttggcctgcatcaggtggccttcccatttaagtgccttctctgtgactgagagccctagtgtga

SEQ ID NO: 734 - DNA, 515 bp, Homo sapiens
ggtcacgttcttggatcctcagaactctttgctcttgtcggggtgggggtgggaactcacgtggggagcggtggctgagaaaatgtaaggattctggaatacatattccatggactttccttccctctcctgcttcctcttttcctgctccctaacctttcgccgaatggggcagacaaacactgacgtttctgggtggccagtgcggctgccaggttcctgtactactgccttgtacttttcattttggctcaccgtggattttctcataggaagtttggtcagagtgaattgaatattgtaagtcagccactgggacccgaggatttctgggaccccgcagttgggaggaggaagtagtccagccttccaggtgggcgtgagaggcaatgactcgttacctgccgcccatcaccttggaggccttccctggccttgagtagaaaagtcggggatcggggcaagagaggctgagtacggatgggaaactattgtgcacaagtctttccagagga

SEQ ID NO: 735 - DNA, 476 bp, Homo sapiens
catttgcgtctggcctggagtaagcaggtccgacccctcgttctttacagcttagtgttattctggcatttggttaagctggcttaatcttgtttaatgttatcagtacattttaaataggggcattgaaatttactcccaccaccagggcttttttgggggatgcctgggcctttaaaacactagccaaactctaattaattctcaaatcactgccaggagttcttgctcctggctgcaggcccaggccccaaggtctccttcttggggtcacaaacagcagtaaggaagaggaatatatagcaactcagggcctgggaattgtggggcaatccgttcttagggactggatacttctggctggctgagtatagtactagctgcctccccaccaggttccgagtagtgtctgagactctgctctgcagggcctagggtagcgctgggagtgtagaagtggcctgcccttaactgtt

SEQ ID NO: 736 - DNA, 305 bp, Homo sapiens
ctgcgcctcactggtccagtgacggacgatgccttgcaccgtgaactccgtaggctccgccgcctcctctgggatcttgagcagcaggagctgccagccaattatcgccatgggcctcccgtggccacgtctccttgagaaccaataccaaacgagcgcgcgaaccttgaaatgtcacgggcttctacggacaggagcccgcctgagcgcaaagctttctgggagttgtagttcttatcccgcgtggaatgttgggagattgagttttcgggaagtagcggatgggacggtgggagcatgggctt

SEQ ID NO: 737 - DNA, 501 bp, Homo sapiens
  misc_feature (262)..(262): n is a, c, g, or t
  misc_feature (264)..(264): n is a, c, g, or t
  misc_feature (266)..(266): n is a, c, g, or t
  misc_feature (268)..(270): n is a, c, g, or t
  misc_feature (272)..(272): n is a, c, g, or t
  misc_feature (277)..(277): n is a, c, g, or t
  misc_feature (282)..(282): n is a, c, g, or t
  misc_feature (287)..(287): n is a, c, g, or t
  misc_feature (312)..(312): n is a, c, g, or t
  misc_feature (331)..(331): n is a, c, g, or t
  misc_feature (336)..(336): n is a, c, g, or t
  misc_feature (347)..(347): n is a, c, g, or t
  misc_feature (447)..(447): n is a, c, g, or t
  misc_feature (463)..(463): n is a, c, g, or t
gagaaggagcggaggatggccaacaatgcccgagagcgtctgcgggtccgtgacatcaacgaggctttcaaagagctcggccgcatggtgcagctccacctcaagagtgacaagccccagaccaagctcctgatcctccaccaggcggtggccgtcatcctcagtctggagcagcaagtccgagaaaggaatctgaatccgaaagctgcgtgtctgaaaagaagggaggaagagaaggtgtcctcggagcctccccctctcncntngnnngncccanacccnggaangggagacgcatcgaatcacatgggnacagatgtaaaagggtccnaagtngccacattgcnttcattaaaacaagagaccacttccttaacagctgtattatcttaaacccacataaacacttctccttaacccccatttttgtaatataagacaagtctnagtagttatgaatcgnagacgcaagaggtttcagcattcccaattatcaaaaaa

SEQ ID NO: 738 - DNA, 544 bp, Homo sapiens
  misc_feature (174)..(174): n is a, c, g, or t
  misc_feature (389)..(389): n is a, c, g, or t
tgtgccttcattcatgggttaatggattaatgggttatcacaggaatgggactggtggctttataagaagaggaaaagagaactgagctagcatgcccagcccacagagagcctccactagagtgatgctaagtggaaatgtgaggtgcagctgccacagagggcccccaccangggaaatgtctagtgtctagtggatccaggccacaggagagagtgccttgtggagcgctgggagcaggacctgaccaccaccaggaccccagaactgtggagtcagtggcagcatgcagcgcccccttgggaaagctttaggcaccagcctgcaacccattcgagcagccacgtaggctgcacccagcaaagccacaggcacggggctacctgangccttgggggcccaatccctgctccagtgtgtccgtgaggcagcacacgaagtcaaaagagattattctcttcccacagataccttttctctcccatgaccctttaacagcatctgcttcattcccctcaccttcccaggctgatctgaggtaaa

SEQ ID NO: 739 - DNA, 313 bp, Homo sapiens
  misc_feature (34)..(34): n is a, c, g, or t
  misc_feature (44)..(44): n is a, c, g, or t
  misc_feature (50)..(50): n is a, c, g, or t
  misc_feature (187)..(187): n is a, c, g, or t
ggcacatcaggatgcccctcggagagcatgtgcnacgtgtcccnacctgnagcgagcgtgtgtgtgtgctcctctgcgtcccaggtttggacgtctagggtttggtgtgcctgtcttctgccctccctgagcccacagggtcagtcaatgtatcttctacgtgcctctccctctgccttctctcacnagtgcccccggctccagagctcaggggtaggggttctcctgagggtgcaggggatccttctcatctcctggaccctccagggcactctggtccctattccccagctcctaggcagctgagccgggt

SEQ ID NO: 740 - DNA, 459 bp, Homo sapiens
acaggacttagacccagctcaatcccacaattgggaaggggtcatggagtgagtgtgcagagagtgagtgaggacataaggaaggacatgtcccactccatcccccttcctgctcccccatttcctaactcccccagtgtgaattctcagggtcacttctgcctcctcccgtttcccctccacatccaaacagcaccctggtcctctctatcccccctctcctggggtccctcacatgccccttcccttctgttgtgggctgcacaccaaagcctcctcccctccccacttcctaggcactaggatctctctgtggcttcccctgctgggtggtgtcacctctttctctgctttcagagaaacccttcccgcctttcctcagagtgcttcccaaactgaggtcccatggcacactgtcctgggaggcgttcagagggttccatgatggactaggtttgg

SEQ ID NO: 741 - DNA, 514 bp, Homo sapiens
gctgaggagtgcgggtgcacagcgcgggactggcaggcagctccacctgctgccccagtgctggatccactgggtgaagccagctgggctcctgagtctggtggggacttggagaacctttatgtctagctaagggattgtaaatacaccgatgggcactctgtatctagctcaaggtttgtaaacacaccaatcagcaccctgtgtctagctcagtgtttgtgaatgcaccaatccacactctgtatctggctactctggtggggacttggagaacctttgtgtccacactctgtatctagctaatctagtggggatgtggagaacctttgtgtctagctcagggatcgtaaacgcaccaatcagcaccctgtcaaaacagaccacttgactctctgtaaaatggaccaatcagcaggatgtgggtggggcgagacaagagaataaaagcaggctgcctgagccagcagtgacaacccccctcgggtcccctcccacgccgtggaagctttgt

SEQ ID NO: 742 - DNA, 551 bp, Homo sapiens
agagccagccaatgtgggcgtcactaaagcaaaaacagggggtgctgtagaccggctgacggacaccagcagatacacgggctcccacaaggagcgcttcgatgagagcggcaagggcaagggcattgcgggacggcaggacatcctggacgacagtggctacgtgagcgcctacaagaatgcaggcacctacgatgccaaggtgaagaagtgaggcttgggaagaccgccctgccaagtgcggctgcccctgccagaggctcaggcctgggtctaaggggcacgtggagcaagagatcctggtcccctccctgctggacctgccacccagagcttcctgcctagtcccactgggctggcccaccaggcctctgacccaggctgctctgcggccccttcctcctcctcttcctgctccaacttctgtccacctggggacagtctgtgcctgtagcctcatgaccccaacccagccccaggcatggctaacccctgactgcttgcctcatatttaagctgctgctctggccaagtgcctaattttaacccag

SEQ ID NO: 743 - DNA, 441 bp, Homo sapiens
gatttgattacagtggctttgactataatgtgggagccaatttttgcctcagtcttcatttttatatttaccttgttattctcaggcatttttttcttctatgtgagagttaaaatcattctgtaatttccccccaaaatcatattggtattctagttggcaatgtcttacatttatgttaagtttgagggaattggtagttcaagtataagttaattaaggccattttatttctaagtgaacagacttgaaactccagagctactgaagtaaaagttagaatcatttgcattttcattcagataggagataattttgtaaattttgatgctattattttaactctattagcttaagtaatgtcataatagaaaacacaagcatttgaccaaatgagatccattcagcgactaactggcaaggcactcaaaacatgtcatt

SEQ ID NO: 744 - DNA, 349 bp, Homo sapiens
cctgcccagctgtaaggaccgggggtctccctcctcactaccgccagacaccccggtggaagcatttagaggggaccacgggagggacaaggcttctctgtccgcccttcacacctccagcctcacgttcacttaggcacatcacacacacactggcacacgcaggcatccatccatccgtcattcattcaaatattattgagcacctactatgtgcccagccctgttctaggcactgggcattaccatagagaacaaaatagacaaatacatctgccctcatggaaggtgacgttcccggagagggcacctacacagtcacgcaaacacacactaattcctggcaggc

SEQ ID NO: 745 - DNA, 378 bp, Homo sapiens
ggatgcttagcatgcaagttccctccatcattgccaccttggtagagagggatggctccccaccctcagcgttggggattcacgctccagcctccttcttggttgtcatagtgatagggtagccttattgccccctcttcttataccctaaaaccttctacactagtgccatgggaaccaggtctgaaaaagtagagagaagtgaaagtagagtctgggaagtagctgcctataactgagactagacggaaaaggaatactcgtgtattttaagatatgaatgtgactcaagactcgaggccgatacgaggctgtgattctgcctttggatggatgttgctgtacacagatgctacagacttgtactaacacaccgta

SEQ ID NO: 746 - DNA, 496 bp, Homo sapiens
tgttttcatgtcttccttacacttagtggaataagaaactttttgaagtagaggaaatacattgaggtaacatccttttctctgacagtcaagtagtccatcagaaattggcagtcacttcccagattgtaccagcaaatacacaaggaattctttttgtttgtttcagttcatactagtcccttcccaatccatcagtaaagaccccatctgccttgtccatgccgtttcccaacagggatgtcacttgatatgagaatctcaaatctcaatgccttataagcattccttcctgtgtccattaagactctgataattgtctcccctccataggaatttctcccaggaaagaaatatatccccatctccgtttcatatcagaactaccgtccccgatattcccttcagagagattaaagaccagaaaaaagtgagcctcttcatctgcacctgtaatagtttcagttcctattttcttccattgacccatatttat

SEQ ID NO: 747 - DNA, 521 bp, Homo sapiens
  misc_feature (118)..(118): n is a, c, g, or t
ttagaaaattcctcttcgttcaccttggctcatggtcttccagggtttttatcctggctgtctatgaactagggttttctcctgccttaggaaaaatactgcatcttctggaatctanaaaaaaaaaaaaaaaaagacaaggctcctcttatagccaggcaagcagttgtttagggctagacctgttgtccccgctcgcgtggggtgaacgccccgcagtggatactgtcctcctgtgctctgggcgaggcgtcatagggtgagcacaagtcagcagtgccatggaagtgaacaggcatgtccccgcagaaacaatgcttccctctgaaaaatagagccaggctaggaacctgtaccctcttggtagaagcactttggtcttcactctcttgggtgggtgcagttggaggcaccgattggaggagagcaaggttgagtcaggtgtcagggtctggcaaatcttttgccaatgccctagcaatggagtttctctccgggcattgtcttaccttgggggaagg

SEQ ID NO: 748 - DNA, 466 bp, Homo sapiens
tcagtgtctgggctcatgacttgtaaatggaagctgatgtgaacaggtaattaatattatgacccacttctatttactttgggaaatatcttggatcttaattatcatctgcaagtttcaagaagtattctgccaaaagtatttacaagtatggactcatgagctattgttggttgctaaatgtgaatcacgcgggagtgagtgtgcccttcacactgtgacattgtgacattgtgacaagctccatgtcctttaaaatcagtcactctgcacacaagagaaatcaacttcgtggttggatggggccggaacacaaccagtctttttgtatttattgttactgagacaaaacagtactcactgagtgtttttcagtttcctactggtggttttgatattgtttgtttaagatgtatatttagaatgacatcatctaagaagctgattttgctaaactcctgttccc

SEQ ID NO: 749 - DNA, 524 bp, Homo sapiens
agctcagcgcctttttgcgaaactctactattcctcatcttgtcaggaagagggatgtacatgtggtcgaattccacagacagagccctgcaaaaatactgaattgtacaaatatcgagtgtttacaaatctcctgtgcagtgggacgactcgaaggaggagaaagcgcagtcctgaaagtcaggtcacgattatgggcccacaccttcctccagagaaaaaatgatccctatgctcttgcatccctggtgtcctttgaagttaagaagatgccttatacagatcagccagcaaaactcccagaaggaagcatagcaattaagacatcagttatttgggcaactccgaatgtttccttctcaatcccattatgggtaataatactagcaatacttcttggattgttggttctcgccattttaaccttagctttatggaagtgtggattctttgacagagccagacctcctcaggaggacatgaccgacagggaacagctgacaaatgacaagacccctgaggca

SEQ ID NO: 750 - DNA, 543 bp, Homo sapiens
tatgaatgagccagccatgcttcctcctgcctgtgtgacgctgggcgagtctcttcccctgtctgggccaaacagggagcgggtaagacaatccatgctctaagatccattttagatcaatgtctaaaatagctctatggctctgcggagtcccagcagaggctatggaatgtttctgcaaccctaaggcacagagagccaaccctgagtgtctcagaggccccctgagtgttccccttggcctgagccccttacccattcctgcagccagtgagagacctggcctcagcctggcagcgctctcttcaaggccatatccacctgtgccctggggcttgggagaccccataggccgggactcttgggtcagcccgccactggcttctctctttttctccgtttcattctgtgtgcgttgtggggtgggggagggggtccacctgccttacctttctgagttgcctttagagagatgcgtttttctaggactctgtgcaactgtcgtatatggtcccgtgggctgaccgctttgtacatgagaat

SEQ ID NO: 751 - DNA, 511 bp, Homo sapiens
aacactgcataacccgtttctttgaggagtgtgaccccaacaaggataagcacatcaccctgaaggagtggggccactgctttggaattaaagaagaggacatagatgaaaatctcttgttttgaacgaagattttaaagaactcaactttccagcatcctcctctgttctaaccacttcagaaatatatgcagctgtgatacttgtagatttatatttagcaaaatgttagcatgtatgacaagacaatgagagtaattgcttgacaacaacctatgcaccaggtatttaacattaactttggaaacaaaaatgtacaattaagtaaagtcaacatatgcaaaatactgtacattgtgaacagaagtttaattcatagtaatttcactctctgcattgacttatgagataattaatgattaaactattaatgataaaaataatgcatttgtattgttcataatatcatgtgcacttcaagaaaatggaatgctactcttttgtggtttac

SEQ ID NO: 752 - DNA, 363 bp, Homo sapiens
tgtctcaccatttggggtggcccagggtccctcagcctcagcactcagcgcagagtctggcctggagccacctgatgacacggagctgcacatctagctgtggcccaggctgggccccgacctgggatgcgcacagtgtccccaacgcaggccccactctgagcctgccctgggcagcctcggactatgactggctacggggaggccaccaccaggccccagctctccaccctgaactccccagccccctcagagtactaggaccacagaagccctgttgctcactgacctgtgaccaggtccaatgtggggagaaatatgaaggaggtagcagccctgggttctcctcagtgagggatccct

SEQ ID NO: 753 - DNA, 508 bp, Homo sapiens
agccttgctcaggtgcaagtgccccagggggcggggtgcagaagaatccgagtgtttgccaggcttaaggagaggagaaactgagaaatgaatgctgagacccccggagcaggggtctgagccacagccgtgctcgcccacaaactgatttctcacggcgtgtcaccccaccagggcgcaagcctcactattacttgaactttccaaaacctaaagaggaaaagtgcaatgcgtgttgtacatacagaggtaactatcaatatttaagtttgttgctgtcaagattttttttgtaacttcaaatatagagatatttttgtacgttatatattgtattaagggcattttaaaagcaattatattgtcctcccctattttaagacgtgaatgtctcagcgaggtgtaaagttgttcgccgcgtggaatgtgagtgtgtttgtgtgcatgaaagagaaagactgattacctcctgtgtggaagaaggaaacaccgagtctctgtataatca

SEQ ID NO: 754 - DNA, 455 bp, Homo sapiens
  misc_feature (253)..(254): n is a, c, g, or t
cttggagatatttccgtcctccacccacgtgtctgtggctggaactgcccagcctgctcctggccccctggaagcctccccacagctggtaatctggacttaaggattgctgggccaccgcctctctgcctaccaccattccatatttaagtggagcccctacgtagaaaggccccggggctttattttagtctccttttcagggatgtcgtgggcgggggagggggttcttggtgctacagccctctccccnnacccctaaagggacgccgacgctgtttgctgccttcaccacatattagtgcttgaccctggcaggggaccccatggaaaagatggggaagagcaaaatacatggagacgacgcaccctccaggatgctcgctgggattcccacgcccaccactgtcccccaccccatggctgggaggggcctctgaacggaacagtgtccc

SEQ ID NO: 755 - DNA, 418 bp, Homo sapiens
  misc_feature (223)..(224): n is a, c, g, or t
tcagacacacacaggtcgccagtgacttcacacacacctcatgtgagaaccatgccttttttagtgtgtcctatttcatacctgtacacacttcctcgttttgtaatgagatttacttacacccaaacagatcctgaaagaaagcttcaagttttctcagatgatggatatgttttcactgtattcaataactgacggatgtaaggtgcacgtttcctgatgnntgacgcactgtattccagctggtgatcaagtctgggaacagccgtaacaggtcaaccttgtggagccatcgcgagttagagggtgaaagatggcagaaaaaaaagtcttgtgtgtgagtgtgttttttgagtttgcatcaatcttaatgtctcttcataatacttttataatacattaagcctcttgtctacat

SEQ ID NO: 756 - DNA, 473 bp, Homo sapiens
gaagcctcaagttccagtgcagagatcctacttctctgagtcagctgaccccctccccgcaatccctcaaaccttgaggagaagtggggaccccacccctcatcaggagttccagtgctgcatgcgattatctacccacgtccacgcggccacctcaccctctccgcacacctctggctgtctttttgtactttttgttccagagctgcttctgtctggtttatttaggttttatccttccttttctttgagagttcgtgaagagggaagccaggattggggacctgatggagagtgagagcatgtgaggggtagtgggatggtggggtaccagccactggaggggtcatccttgcccatcgggaccagaaacctgggagagacttggatgaggagtggttgggctgtgcctgggcctagcacggacatggtctgtcctgacagcactcctcggcaggcatggctggtgcctg

SEQ ID NO: 757 - DNA, 554 bp, Homo sapiens
ctggtggagattgcggtgcctgagaacctggtgggagccatcctggggaaggggggcaagacgttggtggagtaccaggagctgacgggcgctcgcatccagatctccaagaagggcgagttcctgccaggcacgcggaaccggcgggtcaccatcacgggcagccccgcggccacgcaagccgctcaatacctcatcagtcagcgggtcacctacgagcagggagtgagggcctcaaacccccagaaagtgggatgaggcctgtggtgtgtgctcccacccttttctctcctcccatctcctcctcttccctctcctcctcccccccaactcctgacctcagcttggtgtagtcctgctcctcttgggatggggctggggtaggcccgactgcaccctccccttctggtagtcataggcaggattgagtgacggttgggaagggggctcagaagccccctccccagcccggaactgacccctccttcctccctccctgtgcttggctgggcctgacccttcctgtcccagggcccaggtctgtgtgatatctg

SEQ ID NO: 758 - DNA, 464 bp, Homo sapiens
  misc_feature (76)..(76): n is a, c, g, or t
  misc_feature (87)..(101): n is a, c, g, or t
  misc_feature (259)..(318): n is a, c, g, or t
cccttggagatatttccgtcctccacccacgtgtctgtggctggaactgcccagcctgctcctggccccctggaancctccccacannnnnnnnnnnnnnnttaaggattgctgggccaccgcctctctgcctaccaccattccatatttaagtggagcccctacgtagaaaggccccggggctttattttagtctccttttcagggatgtcgtgggcgggggagggggttcttggtgctacagccctctccccacccnnnnnnnnnnnnnnnnnnnnnnnnnnnnnnnnnnnnnnnnnnnnnnnnnnnnnnnnnnnncaggggaccccatggaaaagatggggaagagcaaaatacatggagacgacgcaccctccaggatgctcgctgggattcccacgcccaccactgtcccccaccccatggctgggaggggcctctgaacggaacagtgtccccacaga

SEQ ID NO: 759 - DNA, 493 bp, Homo sapiens
gactttttggaatagccctgtctagggcaaactgtggcccccaggagacactacccttccatgccccagacctctgtcttgcatgtgacaattgacaatctggactaccccaagatggcacccaagtgtttggcttctggctacctaaggttaacatgtcactagagtatttttatgagagacaaacattataaaaatctgatggcaaaagcaaaacaaaatggaaagtaggggaggtggatgtgacaacaacttccaaattggctctttggaggcgagaggaaggggagaacttggagaatagtttttgctttgggggtagaggcttcttagattctcccagcatccgcctttccctttagccagtctgctgtcctgaaacccagaagtgatggagagaaaccaacaagagatctcgaaccctgtctagaaggaatgtatttgttgctaaatttcgtagcactgtttacagttttcctccatgttatttatg

SEQ ID NO: 760 - DNA, 474 bp, Homo sapiens
  misc_feature (51)..(51): n is a, c, g, or t
  misc_feature (101)..(117): n is a, c, g, or t
  misc_feature (311)..(311): n is a, c, g, or t
gctctgtgggcttctccaggagcagggagggtggaggggagggatgggggncacaggagctgggagccccgtctccaggaaaaggagaggggttaagatgnnnnnnnnnnnnnnnnnggctacttgatcttgctgaaagtgtttctaaagatagcaccacttttttttttaaagcttttatatattaaaaaacgtatcatgcaccaactgtgaatagctgccgcttgcgcagaggacccggggaggggtcccgagaggctccccatgcaacactggaaatgactgttccagagagcgggcagacctggcanagcgcccctggcgcctgagactaccacccactccgttcctgccagaaacgaccctctgtggccgatgggccatgcgggcccctcgcagccaactcagccagtgttgggactggctcagagcccatgggggctggaggggggcagctgggactctggaatcttc

SEQ ID NO: 761 - DNA, 472 bp, Homo sapiens
acatacagacatatgcatccccacacacgcctatgcacaaacgtggattatcgcacagactgggaggtttagtggtgcatttctcctctgttttctttttaatatacatttaaaatacagtattatcactttataaaacatacattaagcctaataaatggaccaataagccaaactatcagtattttgtatatcctgcataaactctaatttagttcctcaacatattttcagtgtttatgcagacctttagagttaagcctttgtatttccatgttattccacaatatgcaatatttctctgagtagcttctgctatgatattcttatgaagaaaaggggcaactttctgtccactataggagagaattcagccgaagatatgagagtaatgagagacattttccagtcattggatcgtgttttcttttgtccattattgtactgtgctgtaccacatttatttctatat

SEQ ID NO: 762 - DNA, 438 bp, Homo sapiens
  misc_feature (121)..(121): n is a, c, g, or t
cagggcaactcccagggatgtggtgacatgcagggttcaagtgttcttggttccaggcacctcccggctcacggggagctcagaggtccatgccgaggagaccaggcaggacctcccgagnctgcgccccggccggcccatgcgttttgtgatcccaagtgactctgtgggaagggtggggacgaggcgtcgggagggtatacagggagcccctcccgtgcatggctgcccccccgttcattttctccaccacagccgcttgcacgtatagatactgtggtcccctttcttttaatatataaattatgtatggtgaagtggagtgtattgtgtaggtcccgtatttaatgcctctgactgcctttgaagcgcagccctctgtggcccgcagccccctgagcctggctgttgtgtggtatttatgctctctttgtctgc

SEQ ID NO: 763 - DNA, 568 bp, Homo sapiens
  misc_feature (82)..(82): n is a, c, g, or t
  misc_feature (251)..(251): n is a, c, g, or t
  misc_feature (393)..(393): n is a, c, g, or t
  misc_feature (407)..(407): n is a, c, g, or t
  misc_feature (412)..(412): n is a, c, g, or t
cacagcctccaagtcaggtggggtggagtcccagagctgcacagggtttggcccaagtttctaagggaggcacttcctcccntcgcccatcagtgccagcccctgctggctggtgcctgagcccctcagacagccccctgccccgcaggcctgccttctcagggacttctgcggggcctgaggcaagccatggagtgagacccaggagccggacacttctcaggaaatggcttttcccaacccccagcccnccacccggtggttcttcctgttctgtgactgtgtatagtgccaccacagcttatggcatctcattgaggacaaagaaaactgcacaataaaaccaagcctctggaatctgtcctcgtgtccacctggccttcgctcctccancagtgcctgcctgnccccncttcgctggggtctccacgggtgaggctggggaacgccacctcttcctcttccctgacttctccccaaccacttagtagcaacgctaccccaggggctaatgactgcacactgggcttcttttcagaatgaccctaacgagacacatttgcccaaa

SEQ ID NO: 764 - DNA, 339 bp, Homo sapiens
gttttagtcaacagtgtctcgcattctgattgatcatgtgaaggaatcatttatgggccccgtccctaagagaaacagaagaggagtcagaaagaaagatgcctgtgttttcctctgtggggcccgtgcacttcctggagagatgctacaatgcaatatacagcgctccatccccactggggaagctgctgtgatgagactagatgagccttcaacacactcagaaaatgcaacagcaatagggggcagacagctcctacctgtgtttctaggagcaaaagagagggaactaattgcccgtgaagacgccagtggaaggatcagcctcattctaagcaa

SEQ ID NO: 765 - DNA, 537 bp, Homo sapiens
gagtattactgcacagccttcaacagagccaaccacgcctccagtgtccccagaagcaaaatactgacagtcagagtcattcttgccccatggaagaaaggacttattgcagtggttatcatcggagtgatcattgctctcttgatcattgcggccaaatgttattttctgaggaaagccaaggccaagcagatgccagtggaaatgtccaggccagcagtaccacttctgaactccaacaacgagaaaatgtcagatcccaatatggaagctaacagtcattacggtcacaatgacgatgtcggaaaccatgcaatgaaaccaataaatgataataaagagcctctgaactcagacgtgcagtacacggaagttcaagtgtcctcagctgagtctcacaaagatctaggaaagaaggacacagagacagtgtacagtgaagtccggaaagctgtccctgatgccgtggaaagcagatactctagaacggaaggctcccttgatggaacttagacagcaaggccagatgcacatccc

SEQ ID NO: 766 - DNA, 531 bp, Homo sapiens
atcctggccacagacagtttcaagtagtgtcagatttttgttgcttgggcggctgttggtagagtgggcagtgcccgcgccatggggtgctctgtgggcttctccaggagcagggagggtggaggggagggatggggggcacaggagctgggagccccgtctccaggaaaaggagaggggttaagatgcaccgaggctgtagctgggctacttgatcttgctgaaagtgtttctaaagatagcaccacttttttttttaaagcttttatatattaaaaaacgtatcatgcaccaactgtgaatagctgccgcttgcgcagaggacccggggaggggtcccgagaggctccccatgcaacactggaaatgactgttccagagagcgggcagacctggcagagcgcccctggcgcctgagactaccacccactccgttcctgccagaaacgaccctctgtggccgatgggccatgcgggcccctcgcagccaactcagccagtgttgggactggctcagagcccatgggggct

SEQ ID NO: 767 - DNA, 386 bp, Homo sapiens
gcagtcttcagtaaagcctttctcctttcttttctccattgaggacagttctgctcagcaaaattgttgagtacctgttctgggcaggtcccacgctatatgcacaaagttaagaaaaacttggtcttagcccttgggagctgacagcccatgggcattaaggcaaagtagttccagtgatttaaaatacggttccaaatacgctaaaaccaacttgtgccaaccagatttacagattggaaatactgcagatgatgtgaagttatcagttggaggagctgtgattaagctggataataagagaacgtgccatctgtaaagcactcagaaggcagccatccctagatgttggtttcatgtatattacactatctactactatccat

SEQ ID NO: 768 - DNA, 402 bp, Homo sapiens
ttctgattgtggagtgcctctctctaggacggggctgcagcataggagtctcagctgcttacatccaggtccaggattatgtctgctaacagacgctggtgggtaccacctgacgatgaagactgtgtgtctgagaagctcctgaggaagactcgggaatctccactggtgcctataggcttaggaggctgcttggtggtagcagcatacaggatttaccggctgaggtctcgtggttccaccaagatgtccatacacctgattcacacccgagtggcagcgcaggcctgtgcagtgggtgcaatcatgctaggtgctgtgtacacaatgtacagcgattacgtcaagaggatggcacaggatgctggagagaagtaggactcctataggagccggggctgt

SEQ ID NO: 769 - DNA, 488 bp, Homo sapiens
ggtgtgcgaggtagacccagagctaacagaaaagctgaggaaattccgcttccgaaaagagacagacaatgcagccatcataatgaaggtggacaaagaccggcagatggtggtgctggaggaagaatttcagaacatttccccagaggagctcaaaatggagttgccggagagacagcccaggttcgtggtttacagctacaagtacgtgcatgacgatggccgagtgtcctaccctttgtgtttcatcttctccagccctgtgggctgcaagccggaacaacagatgatgtatgcagggagtaaaaacaggctggtgcagacagcagagctcacaaaggtgttcgaaatccgcaccactgatgacctcactgaggcctggctccaagaaaagttgtctttctttcgttgatctctgggctggggactgaattcctgatgtctgagtcctcaggtgactggggacttggaaccctaggacctgaaca

SEQ ID NO: 770 - DNA, 496 bp, Homo sapiens
  misc_feature (179)..(179): n is a, c, g, or t
gagaatgtgtgtcacctctttgcagagcttgacccagatcagcctgctggcgccattgtcaccttcatcaccaaagttctactgggccagagaaaatgaaggaaggccacaagctcagagcccacatcaacactgcccccctcccagcaccccacagccctcacatcccctggcctggnacccaggagacccaggagaaagcaccctcccttaggaatgaggagtgggcatcaggcctgggacactgctctccttccccgcccccagcctgctaagttaagtggacaggcccacaagatgaccttgcatgtgagcagatggcagagatgggtgtgtgaggggtgaggaggcatcagcagttgagccccgaaggagatcaggcagccccacctgcaggagaacgtcagccctccaggggatcagcccctgccagttccacccagctgcaggtgccagcacggcagggatgggagaggggtggggagcgagtcactgc

SEQ ID NO: 771 - DNA, 342 bp, Homo sapiens
caatgtccaccacttcctgtggaaactgagagtcagctggtgactctcccttcttccaatatctctcccaccatcagcacttcccacagtctgagccgtcctgactactggtccagtaacagtcttcgagtgggcctttcaacaccgcccccacctgcctatgagtccatcatcaaggcattcccagattcctgagtagggtggcttttggtttttgtttctttcttgtcttgtcttttattgaaaggaaatcaaaaataggctaaacagaattttgagggcatggcccaaataactcatgagttccaagttgaaacatggttgtgcaagttggacattaca

SEQ ID NO: 772 - DNA, 109 bp, Homo sapiens
cgcccggccttgcatgctctttgaccctgaatttgacctacttgctggggtacagttgcttccttttgaacctccaacagggaaggctctgtccagaaaggattgaatg

SEQ ID NO: 773 - DNA, 296 bp, Homo sapiens
gccctcttgatggatcacgtaaaactgaaaggcagcggggagcagacaaagatgaggtctacactgtccttcatggggattaaagctatggttatattagcaccaaacttctacaaaccaagctcaggacccaaccctagaagggcccaaatgagagaatggtacttagggatggcaaaacgggcctggctagagcttcgggtgtgtgtgtctgtctgtgtatgcatacatatgtgtgtatatatggttttgtcaggtgtgtaaatttgcaaattgtttcctttatatatgtatgt

SEQ ID NO: 774 - DNA, 165 bp, Homo sapiens
tgagatggagctgagactttatttattgggggtagggggatggaggaggtccctccaacatgtttggacccagctcctttgggttccactgacacccctgcccctgcccctgcccagaaccaagtgccatttctcactctggagccttaataaactgcaatttgt

SEQ ID NO: 775 - DNA, 370 bp, Homo sapiens
gagggctgatccagagaccctgagcctacagcaaggctgtggtgggtcggatggtctttggatgtgtcagcttagctaggccacagtcaccagtaattcaatcagacactaatctaggtatttctgtgaaggtattttgtagatgtgacagaagtccattcccaattgactaagtaagtgagattatctcagataatctgggtcagcctgacctgattagtcagaaggcctaaagaacagagctaagggtttccctgaggaagaaattctgcctgaggacagcagcccagtgcttggcgagagttcctgacagtctgcccttctgatagcctgcctcacagagtttagacatgactagccagctcctaca

SEQ ID NO: 776 - DNA, 515 bp, Homo sapiens
gaattctgcacttacacgtactcaagggagcgcgcccgcgttatcctcgtacctttgtcttctttccatctgtggagtcagtgggtgtcggccgctctgttgtgggggaggtgaaccagggaggggcagggcaaggcagggcccccagagctgggccacacagtgggtgctgggcctcgccccgaagcttctggtgcagcagcctctggtgctgtctccgcggaagtcagggcggctggattccaggacaggagtgaatgtaaaaataaatatcgcttagaatgcaggagaagggtggagaggaggcaggggccgagggggtgcttggtgccaaactgaaattcagtttcttgtgtggggccttgcggttcagagctcttggcgagggtggagggaggagtgtcatttctatgtgtaatttctgagccattgtactgtctgggctgggggggacactgtccaagggagtggcccctatgagtttatattttaaccactgcttcaaatctcgattt

SEQ ID NO: 777 - DNA, 318 bp, Homo sapiens
tgatcatgatggccttctacacgggactgtctcgcgtatcagaccacaagcaccatcccagtgatgttctggcaggatttgctcaaggagccctggtggcctgctgcatagttttcttcgtgtctgacctcttcaagactaagacgacgctctccctgcctgcccctgctatccggaaggaaatcctttcacctgtggacattattgacaggaacaatcaccacaacatgatgtaggtgccacccacctcctgagctgtttttgtaaaatgactgctgacagcaagttcttgctgctctccaatctcatcagacagta

SEQ ID NO: 778 - DNA, 493 bp, Homo sapiens
taaatctctggaccctggagcacttctaatgtatcaccccatggagtcattgttctaataatcaccaattcagactcagatcctcgtggtctatggagcatgctgcttgctgtctgtgcagctcccatttccccttcttcctgatagacttggagctgtgtgcctccactccaaggctgcctgcctgctgtaaacactattccactctgtctgccaacaactgcttcaggaatgggcctgagatcccatgcaggtccctgagaagtgagtaaaagtccgcagaggtggggatggaagatctctccttagatagaacctgtcttcctccctggcattgtggggtctgggcgtgacactgggactctcagcagctttgtgctgccaacctgagattgaaggcagtgcctcagagcagcacagagagttggggccccctgagccctgagccaccagccctgcagcctgccctatctccgcatttccagttgtatta

SEQ ID NO: 779 - DNA, 513 bp, Homo sapiens
  misc_feature (57)..(57): n is a, c, g, or t
  misc_feature (150)..(223): n is a, c, g, or t
  misc_feature (463)..(463): n is a, c, g, or t
  misc_feature (485)..(486): n is a, c, g, or t
  misc_feature (488)..(488): n is a, c, g, or t
ccatggagtcattgttctaataatcaccaattcagactcagatcctcgtggtctatngagcatgctgcttgctgtctgtgcagctcccatttccccttcttcctgatagacttggagctgtgtgcctccactccaaggctgcctgcctgnnnnnnnnnnnnnnnnnnnnnnnnnnnnnnnnnnnnnnnnnnnnnnnnnnnnnnnnnnnnnnnnnnnnnnnnnngaagtgagtaaaagtccgcagaggtggggatggaagatctctccttagatagaacctgtcttcctccctggcattgtggggtctgggcgtgacactgggactctcagcagctttgtgctgccaacctgagattgaaggcagtgcctcagagcagcacagagagttggggccccctgagccctgagccaccagccctgcagcctgccctatctccgcatttccagttgtattagccaatanatttcctacttatttaagctanntnagctccgggtctcttctacctgcat

SEQ ID NO: 780 - DNA, 2621 bp, homo sapiens
ccttttttggcctcgacggcggcaacccagcctccctcctaacgccctccgcctttgggaccaaccaggggagctcaagttagtagcagccaaggagaggcgctgccttgccaagactaaaaagggaggggagaagagaggaaaaaagcaagaatcccccacccctctcccgggcggagggggcgggaagagcgcgtcctggccaagccgagtagtgtcttccactcggtgcgtctctctaggagccgcgcgggaaggatgctggtccgcaggggcgcgcgcgcagggcccaggatgccgcggggctggaccgcgctttgcttgctgagtttgctgccttctgggttcatgagtcttgacaacaacggtactgctaccccagagttacctacccagggaacattttcaaatgtttctacaaatgtatcctaccaagaaactacaacacctagtacccttggaagtaccagcctgcaccctgtgtctcaacatggcaatgaggccacaacaaacatcacagaaacgacagtcaaattcacatctacctctgtgataacctcagtttatggaaacacaaactcttctgtccagtcacagacctctgtaatcagcacagtgttcaccaccccagccaacgtttcaactccagagacaaccttgaagcctagcctgtcacctggaaatgtttcagacctttcaaccactagcactagccttgcaacatctcccactaaaccctatacatcatcttctcctatcctaagtgacatcaaggcagaaatcaaatgttcaggcatcagagaagtgaaattgactcagggcatctgcctggagcaaaataagacctccagctgtgcggagtttaagaaggacaggggagagggcctggcccgagtgctgtgtggggaggagcaggctgatgctgatgctggggcccaggtatgctccctgctccttgcccagtctgaggtgaggcctcagtgtctactgctggtcttggccaacagaacagaaatttccagcaaactccaacttatgaaaaagcaccaatctgacctgaaaaagctggggatcctagatttcactgagcaagatgttgcaagccaccagagctattcccaaaagaccctgattgcactggtcacctcgggagccctgctggctgtcttgggcatcactggctatttcctgatgaatcgccgcagctggagccccacaggagaaaggctgggcgaagacccttattacacggaaaacggtggaggccagggctatagctcaggacctgggacctcccctgaggctcagggaaaggccagtgtgaaccgaggggctcaggaaaacgggaccggccaggccacctccagaaacggccattcagcaagacaacacgtggtggctgataccgaattgtgactcggctaggtggggcaaggctgggcagtgtccgagagagcacccctctctgcatctgaccacgtgctacccccatgctggaggtgacatctcttacgcccaacccttccccactgcacacacctcagaggctgttcttggggccctacaccttgaggaggggcaggtaaactcctgtcctttacacattcggctccctggagccagactctggtcttctttgggtaaacgtgtgacgggggaaagccaaggtctggagaagctcccaggaacaatcgatggccttgcagcactcacacaggacccccttcccctaccccctcctctctgccgcaatacaggaacccccaggggaaagatgagcttttctaggctacaattttctcccaggaagctttgatttttaccgtttcttccctgtattttctttctctactttgaggaaaccaaagtaaccttttgcacctgctctcttgtaatgatatagccagaaaaacgtgttgccttgaaccacttccctcatctctcctccaagacactgtggacttggtcaccagctcctcccttgttctctaagttccactgagctccatgtgccccctctaccatttgcagagtcctgcacagttttctggctggagcctagaacaggcctcccaagttttaggacaaacagctcagttctagtctctctggggccacacagaaactctttttgggctcctttttctccctctggatcaaagtaggcaggaccatgggaccaggtcttggagctgagcctctcacctgtactcttccgaaaaatcctcttcctctgaggctggatcctagccttatcctctgatctccatggcttcctcctccctcctgccgactcctgggttgagctgttgcctcagtcccccaacagatgcttttctgtctctgcctccctcaccctgagccccttccttgctctgcacccccatatggtcatagcccagatcagctcctaacccttatcaccagctgcctcttctgtgggtgacccaggtccttgtttgctgttgatttctttccagaggggttgagcagggatcctggtttcaatgacggttggaaatagaaatttccagagaagagagtattgggtagatattttttctgaatacaaagtgatgtgtttaaatactgcaattaaagtgatactgaaacacaaaaaa

SEQ ID NO: 781 - protein, 385 aa, homo sapiens
MLVRRGARAGPRMPRGWTALCLLSLLPSGFMSLDNNGTATPELPTQGTFSNVSTNVSYQETTTPSTLGSTSLHPVSQHGNEATTNITETTVKFTSTSVITSVYGNTNSSVQSQTSVISTVFTTPANVSTPETTLKPSLSPGNVSDLSTTSTSLATSPTKPYTSSSPILSDIKAEIKCSGIREVKLTQGICLEQNKTSSCAEFKKDRGEGLARVLCGEEQADADAGAQVCSLLLAQSEVRPQCLLLVLANRTEISSKLQLMKKHQSDLKKLGILDFTEQDVASHQSYSQKTLIALVTSGALLAVLGITGYFLMNRRSWSPTGERLGEDPYYTENGGGQGYSSGPGTSPEAQGKASVNRGAQENGTGQATSRNGHSARQHVVADTEL

SEQ ID NO: 782 - DNA, 2879 bp, homo sapiens
cattcccgctctccttcccgaaccgccattttgaaaatcttgttgattctggggagccgagcgcgcggcgcgagcgtcacgccagacagcggcccgcgcgccttctcctcggcgtcggccgccgccgcctcccagaacctcctcgtgccctcgcgtgccaggcccgcggcggccgaaatccgcggttcacagcatgtccgcctcggcccctgctgcggagggggagggaacccccacccagcccgcgtccgagaaagaacccgaaatgcccggtcccagagaggagagcgaggaggaagaggacgaggacgacgaggaggaggaggaggaggaaaaagaaaagagtctcatcgtggaaggcaagagggaaaagaaaaaagtagagaggttgacaatgcaagtctcttccttacagagagagccatttacaattgcacaaggaaaggggcagaaactttgtgaaattgagaggatacatttttttctaagtaagaagaaaaccgatgaacttagaaatctacacaaactgctttacaacaggccaggcactgtgtcctcattaaagaagaatgtgggtcagttcagtggctttccatttgaaaaaggaagtgtccaatataaaaagaaggaagaaatgttgaaaaaatttagaaatgccatgttaaagagcatctgtgaggttcttgatttggagagatcaggtgtaaatagtgaactagtgaagaggatcttgaatttcttaatgcatccaaagccttctggcaaaccattgccgaaatctaaaaaaacttgtagcaaaggcagtaaaaaggaacggaacagttctggaatggcaaggaaggctaagcgaaccaaatgtcctgaaattctgtcagatgaatctagtagtgatgaagatgaaaagaaaaacaaggaagagtcttcagatgatgaagataaagaaagtgaagaggagccaccaaaaaagacagccaaaagagaaaaacctaaacagaaagctacttctaaaagtaaaaaatctgtgaaaagtgccaatgttaagaaagcagatagcagcaccaccaagaagaatcaaaacagttccaaaaaagaaagtgagtctgaggatagttcagatgatgaacctttaattaaaaagttgaagaaaccccctacagatgaagagttaaaggaaacaataaagaaattactggccagtgctaacttggaagaagtcacaatgaaacagatttgcaaaaaggtctatgaaaattatcctacttatgatttaactgaaagaaaagatttcataaaaacaactgtaaaagagctaatttcttgagatagaggacagagaagatgactcgttcccatagatttgaagatctgatttataccattataccagcaaagagaatgtatttccttttctaaatccttgttaagcaacgttagtagaacttactgctgacctttttatcttgagtgttatgtgaatttgagtttgctgttttaaattgcatttctatgccatttttagtttaaaatcttgcatggcattaattgttccttgcttttatagttgtattttgtacattttggatttctttatataaggtcatagattcttgagctgttgtggtttttagtgcacttaatattagcttgcttaaggcatacttttaatcaagtagaacaaaaactattatcaccaggatttatacatacagagattgtagtatttagtatatgaaatattttgaatacacatctctgtcagtgtgaaaattcagcggcagtgtgtccatcatattaaaaatatacaagctacagttgtccagatcactgaattggaacttttctcctgcatgtgtatatatgtcaaattgtcagcatgacaaaagtgacagatgttatttttgtatttttaaaaaacaattggttgtatataaagtttttttatttcttttgtgcagatcactttttaaactcacataggtaggtatctttatagttgtagactatggaatgtcagtgttcagccaaacagtatgatggaacagtgaaagtcaattcagtgatggcaacactgaaggaacagttaccctgctttgcctcgaaagtgtcatcaatttgtaattttagtattaactctgtaaaagtgtctgtaggtacgttttatattatataaggacagaccaaaaatcaacctatcaaagcttcaaaaactttgggaaagggtgggattaagtacaagcacatttggcttacagtaaatgaactgatttttattaactgcttttgcccatataaaatgctgatatttactggaaacctagccagcttcacgattatgactaaagtaccagattataatgccagaatataatgtgcaggcaatcgtggatgtctctgacaaagtgtgtctcaaaaataatatacttttacattaaagaaatttaatgtttctctggagttggggctcttggctttcagagtttggttaatcagtgttgattctagatgatcaacataatggaccactcctgaatgagacttaattttgtctttcaaatttactgtcttaaatcagtttattaaatctgaattttaaaacatgctgtttatgacacaatgacacatttgttgcaccaattaagtgttgaaaaatatctttgcatcatagaacagaaatatataaaaatatatgttgaatgttaacaggtattttcacaggtttgtttcttgatagttactcagacactagggaaaggtaaatacaagtgaacaaaataagcaactaaatgagacctaataattggccttcgattttaaatatttgttcttataaaccttgtcaataaaaataaatctaaatcactggtgttttaaaaaaaaaa

SEQ ID NO: 783 - protein, 375 aa, homo sapiens
MSASAPAAEGEGTPTQPASEKEPEMPGPREESEEEEDEDDEEEEEEEKEKSLIVEGKREKKKVERLTMQVSSLQREPFTIAQGKGQKLCEIERIHFFLSKKKTDELRNLHKLLYNRPGTVSSLKKNVGQFSGFPFEKGSVQYKKKEEMLKKFRNAMLKSICEVLDLERSGVNSELVKRILNFLMHPKPSGKPLPKSKKTCSKGSKKERNSSGMARKAKRTKCPEILSDESSSDEDEKKNKEESSDDEDKESEEEPPKKTAKREKPKQKATSKSKKSVKSANVKKADSSTTKKNQNSSKKESESEDSSDDEPLIKKLKKPPTDEELKETIKKLLASANLEEVTMKQICKKVYENYPTYDLTERKDFIKTTVKELIS

SEQ ID NO: 784 - DNA, 4435 bp, homo sapiens; identical to SEQ ID NO: 71

SEQ ID NO: 785 - protein, 1360 aa, homo sapiens; identical to SEQ ID NO: 72
